United States Patent Application Publication US 2003/0104410 A1 - sequence listing, part 4

SEQ ID NO: 118874 - DNA, 25 bp, Homo sapien
ggtacgacatcacttttcaatttac

SEQ ID NO: 118875 - DNA, 25 bp, Homo sapien
gtggacctccagtaatttctcttca

SEQ ID NO: 118876 - DNA, 25 bp, Homo sapien
gtggacctccagaaatttctcttca

SEQ ID NO: 118877 - DNA, 25 bp, Homo sapien
tacgtactcagagtttttagttacc

SEQ ID NO: 118878 - DNA, 25 bp, Homo sapien
tacgtactcagactttttagttacc

SEQ ID NO: 118879 - DNA, 25 bp, Homo sapien
gtaagagattgacactgtttttctc

SEQ ID NO: 118880 - DNA, 25 bp, Homo sapien
gtaagagattgagactgtttttctc

SEQ ID NO: 118881 - DNA, 25 bp, Homo sapien
ggtgggacatgctttttcacgtttt

SEQ ID NO: 118882 - DNA, 25 bp, Homo sapien
ggtgggacatgcattttcacgtttt

SEQ ID NO: 118883 - DNA, 25 bp, Homo sapien
gtatgaaacacacttgtcattatcg

SEQ ID NO: 118884 - DNA, 25 bp, Homo sapien
gtatgaaacacagttgtcattatcg

SEQ ID NO: 118885 - DNA, 25 bp, Homo sapien
tacacatattgttttcagactcgtg

SEQ ID NO: 118886 - DNA, 25 bp, Homo sapien
tacacatattgtattcagactcgtg

SEQ ID NO: 118887 - DNA, 25 bp, Homo sapien
ctactatcgggaagactcgtgtcga

SEQ ID NO: 118888 - DNA, 25 bp, Homo sapien
ctactatcgggatgactcgtgtcga

SEQ ID NO: 118889 - DNA, 25 bp, Homo sapien
atgacgagtgaggtacgtcgtgtga

SEQ ID NO: 118890 - DNA, 25 bp, Homo sapien
atgacgagtgagctacgtcgtgtga

SEQ ID NO: 118891 - DNA, 25 bp, Homo sapien
cttgaccgaaaggagtctacctgac

SEQ ID NO: 118892 - DNA, 25 bp, Homo sapien
cttgaccgaaagcagtctacctgac

SEQ ID NO: 118893 - DNA, 25 bp, Homo sapien
aggtcccatcatctccgttaccggg

SEQ ID NO: 118894 - DNA, 25 bp, Homo sapien
aggtcccatcatgtccgttaccggg

SEQ ID NO: 118895 - DNA, 25 bp, Homo sapien
cgtcccaacttctgtcagggctcgg

SEQ ID NO: 118896 - DNA, 25 bp, Homo sapien
cgtcccaacttcagtcagggctcgg

SEQ ID NO: 118897 - DNA, 25 bp, Homo sapien
ggtgttgtccccaacagtcaccctg

SEQ ID NO: 118898 - DNA, 25 bp, Homo sapien
ggtgttgtcccctacagtcaccctg

SEQ ID NO: 118899 - DNA, 25 bp, Homo sapien
tcctggaccactgtaaagccgtagt

SEQ ID NO: 118900 - DNA, 25 bp, Homo sapien
tcctggaccactctaaagccgtagt

SEQ ID NO: 118901 - DNA, 25 bp, Homo sapien
gttttcgacccgtataagtcaatga

SEQ ID NO: 118902 - DNA, 25 bp, Homo sapien
gttttcgacccgaataagtcaatga

SEQ ID NO: 118903 - DNA, 25 bp, Homo sapien
aggtgtttcctcgaatgtcgcccca

SEQ ID NO: 118904 - DNA, 25 bp, Homo sapien
aggtgtttcctccaatgtcgcccca

SEQ ID NO: 118905 - DNA, 25 bp, Homo sapien
cgtctgtccctgtaagggcccggag

SEQ ID NO: 118906 - DNA, 25 bp, Homo sapien
cgtctgtccctgaaagggcccggag

SEQ ID NO: 118907 - DNA, 25 bp, Homo sapien
tggacgttcctgaaggggcccgtcc

SEQ ID NO: 118908 - DNA, 25 bp, Homo sapien
tggacgttcctgtaggggcccgtcc

SEQ ID NO: 118909 - DNA, 25 bp, Homo sapien
tacgttttgaagtgacatcgattcg

SEQ ID NO: 118910 - DNA, 25 bp, Homo sapien
tacgttttgaagagacatcgattcg

SEQ ID NO: 118911 - DNA, 25 bp, Homo sapien
acttcgtaggacaaacgcccatctt

SEQ ID NO: 118912 - DNA, 25 bp, Homo sapien
acttcgtaggactaacgcccatctt

SEQ ID NO: 118913 - DNA, 25 bp, Homo sapien
gctttgagacgaaagacttcttaga

SEQ ID NO: 118914 - DNA, 25 bp, Homo sapien
gctttgagacgatagacttcttaga

SEQ ID NO: 118915 - DNA, 25 bp, Homo sapien
ttctttgtgagagaaccactttcgt

SEQ ID NO: 118916 - DNA, 25 bp, Homo sapien
ttctttgtgagacaaccactttcgt

SEQ ID NO: 118917 - DNA, 25 bp, Homo sapien
ccgcagaagtggtggtacctcttcc

SEQ ID NO: 118918 - DNA, 25 bp, Homo sapien
ccgcagaagtggaggtacctcttcc

SEQ ID NO: 118919 - DNA, 25 bp, Homo sapien
cgcaaacgtgcgacggtccgcattc

SEQ ID NO: 118920 - DNA, 25 bp, Homo sapien
cgcaaacgtgcgtcggtccgcattc

SEQ ID NO: 118921 - DNA, 25 bp, Homo sapien
taagaggtaggtgtccggtaccgta

SEQ ID NO: 118922 - DNA, 25 bp, Homo sapien
taagaggtaggtctccggtaccgta

SEQ ID NO: 118923 - DNA, 25 bp, Homo sapien
agacaacataacgtgtgccgaacca

SEQ ID NO: 118924 - DNA, 25 bp, Homo sapien
agacaacataacctgtgccgaacca

SEQ ID NO: 118925 - DNA, 25 bp, Homo sapien
tgccttatagagctttttgacgtga

SEQ ID NO: 118926 - DNA, 25 bp, Homo sapien
tgccttatagaggtttttgacgtga

SEQ ID NO: 118927 - DNA, 25 bp, Homo sapien
attttttaggcaagcgtttactcga

SEQ ID NO: 118928 - DNA, 25 bp, Homo sapien
attttttaggcatgcgtttactcga

SEQ ID NO: 118929 - DNA, 25 bp, Homo sapien
aacttttcaaggaggtgtccgtgtg

SEQ ID NO: 118930 - DNA, 25 bp, Homo sapien
aacttttcaaggtggtgtccgtgtg

SEQ ID NO: 118931 - DNA, 25 bp, Homo sapien
tctttaaccctcactgtgtcctgtg

SEQ ID NO: 118932 - DNA, 25 bp, Homo sapien
tctttaaccctctctgtgtcctgtg

SEQ ID NO: 118933 - DNA, 25 bp, Homo sapien
gagttaccgcctctcttataatgtt

SEQ ID NO: 118934 - DNA, 25 bp, Homo sapien
gagttaccgcctgtcttataatgtt

SEQ ID NO: 118935 - DNA, 25 bp, Homo sapien
ttaacccctcgatctctctcgggtt

SEQ ID NO: 118936 - DNA, 25 bp, Homo sapien
ttaacccctcgaactctctcgggtt

SEQ ID NO: 118937 - DNA, 25 bp, Homo sapien
tcatctgcgtcgaccggcacgtgtc

SEQ ID NO: 118938 - DNA, 25 bp, Homo sapien
tcatctgcgtcgtccggcacgtgtc

SEQ ID NO: 118939 - DNA, 25 bp, Homo sapien
taccatcgttccaccgacggggtct

SEQ ID NO: 118940 - DNA, 25 bp, Homo sapien
taccatcgttcctccgacggggtct

SEQ ID NO: 118941 - DNA, 25 bp, Homo sapien
cctcagcgactttgcaacagtttat

SEQ ID NO: 118942 - DNA, 25 bp, Homo sapien
cctcagcgacttagcaacagtttat

SEQ ID NO: 118943 - DNA, 25 bp, Homo sapien
ctctcgtccgcctggagacgcttta

SEQ ID NO: 118944 - DNA, 25 bp, Homo sapien
ctctcgtccgccaggagacgcttta

SEQ ID NO: 118945 - DNA, 25 bp, Homo sapien
accgtaggatggtgatacgtgtaca

SEQ ID NO: 118946 - DNA, 25 bp, Homo sapien
accgtaggatggagatacgtgtaca

SEQ ID NO: 118947 - DNA, 25 bp, Homo sapien
tcgaggtccccactactacgtgagt

SEQ ID NO: 118948 - DNA, 25 bp, Homo sapien
tcgaggtccccagtactacgtgagt

SEQ ID NO: 118949 - DNA, 25 bp, Homo sapien
tcgtcctcgttcattctagactcgg

SEQ ID NO: 118950 - DNA, 25 bp, Homo sapien
tcgtcctcgttctttctagactcgg

SEQ ID NO: 118951 - DNA, 25 bp, Homo sapien
gactcgtccttacagataagtcttg

SEQ ID NO: 118952 - DNA, 25 bp, Homo sapien
gactcgtccttagagataagtcttg

SEQ ID NO: 118953 - DNA, 25 bp, Homo sapien
tccgccatacaaggattcgacttgt

SEQ ID NO: 118954 - DNA, 25 bp, Homo sapien
tccgccatacaacgattcgacttgt

SEQ ID NO: 118955 - DNA, 25 bp, Homo sapien
ccgtggaccaaagacagtttatata

SEQ ID NO: 118956 - DNA, 25 bp, Homo sapien
ccgtggaccaaacacagtttatata

SEQ ID NO: 118957 - DNA, 25 bp, Homo sapien
tttggaagtaaacgactcttactta

SEQ ID NO: 118958 - DNA, 25 bp, Homo sapien
tttggaagtaaaggactcttactta

SEQ ID NO: 118959 - DNA, 25 bp, Homo sapien
gagaccgagacaggtgcccgttgag

SEQ ID NO: 118960 - DNA, 25 bp, Homo sapien
gagaccgagacacgtgcccgttgag

SEQ ID NO: 118961 - DNA, 25 bp, Homo sapien
ctagtctccaacactgcaccggtgg

SEQ ID NO: 118962 - DNA, 25 bp, Homo sapien
ctagtctccaactctgcaccggtgg

SEQ ID NO: 118963 - DNA, 25 bp, Homo sapien
aagacactccggacatcacgaatca

SEQ ID NO: 118964 - DNA, 25 bp, Homo sapien
aagacactccggtcatcacgaatca

SEQ ID NO: 118965 - DNA, 25 bp, Homo sapien
gtgaagattcttggggtcaagattc

SEQ ID NO: 118966 - DNA, 25 bp, Homo sapien
gtgaagattcttcgggtcaagattc

SEQ ID NO: 118967 - DNA, 25 bp, Homo sapien
atcattaatgggacttcgtgtccgt

SEQ ID NO: 118968 - DNA, 25 bp, Homo sapien
atcattaatgggtcttcgtgtccgt

SEQ ID NO: 118969 - DNA, 25 bp, Homo sapien
ataatttgtgagttctcatatgaag

SEQ ID NO: 118970 - DNA, 25 bp, Homo sapien
ataatttgtgagatctcatatgaag

SEQ ID NO: 118971 - DNA, 25 bp, Homo sapien
catattgaggttccttactaatacg

SEQ ID NO: 118972 - DNA, 25 bp, Homo sapien
catattgaggttgcttactaatacg

SEQ ID NO: 118973 - DNA, 25 bp, Homo sapien
tatatcagatgttctcttctataac

SEQ ID NO: 118974 - DNA, 25 bp, Homo sapien
tatatcagatgtactcttctataac

SEQ ID NO: 118975 - DNA, 25 bp, Homo sapien
aggacaaacagacttccgtccttta

SEQ ID NO: 118976 - DNA, 25 bp, Homo sapien
aggacaaacagagttccgtccttta

SEQ ID NO: 118977 - DNA, 25 bp, Homo sapien
gacaactaattgtctctaatatgac

SEQ ID NO: 118978 - DNA, 25 bp, Homo sapien
gacaactaattgactctaatatgac

SEQ ID NO: 118979 - DNA, 25 bp, Homo sapien
accgaacaacttcatacaatgggtc

SEQ ID NO: 118980 - DNA, 25 bp, Homo sapien
accgaacaacttgatacaatgggtc

SEQ ID NO: 118981 - DNA, 25 bp, Homo sapien
gacagaccacttgagaaacagcttc

SEQ ID NO: 118982 - DNA, 25 bp, Homo sapien
gacagaccacttcagaaacagcttc

SEQ ID NO: 118983 - DNA, 25 bp, Homo sapien
ggagtgaacagaacgggaacatttc

SEQ ID NO: 118984 - DNA, 25 bp, Homo sapien
ggagtgaacagatcgggaacatttc

SEQ ID NO: 118985 - DNA, 25 bp, Homo sapien
cggaggacccctagggacggttcga

SEQ ID NO: 118986 - DNA, 25 bp, Homo sapien
cggaggaccccttgggacggttcga

SEQ ID NO: 118987 - DNA, 25 bp, Homo sapien
ctgaagccccctagaacgagaccat

SEQ ID NO: 118988 - DNA, 25 bp, Homo sapien
ctgaagcccccttgaacgagaccat

SEQ ID NO: 118989 - DNA, 25 bp, Homo sapien
gaactatcaatctatgaggacctat

SEQ ID NO: 118990 - DNA, 25 bp, Homo sapien
gaactatcaatcaatgaggacctat

SEQ ID NO: 118991 - DNA, 25 bp, Homo sapien
ccgtaagaatcaggtgagaccctac

SEQ ID NO: 118992 - DNA, 25 bp, Homo sapien
ccgtaagaatcacgtgagaccctac

SEQ ID NO: 118993 - DNA, 25 bp, Homo sapien
ctcgacctagtgttggggactccta

SEQ ID NO: 118994 - DNA, 25 bp, Homo sapien
ctcgacctagtgatggggactccta

SEQ ID NO: 118995 - DNA, 25 bp, Homo sapien
cggaactacagtcgtggtctctcca

SEQ ID NO: 118996 - DNA, 25 bp, Homo sapien
cggaactacagtggtggtctctcca

SEQ ID NO: 118997 - DNA, 25 bp, Homo sapien
ccggaatagacactggtcgacacaa

SEQ ID NO: 118998 - DNA, 25 bp, Homo sapien
ccggaatagacagtggtcgacacaa

SEQ ID NO: 118999 - DNA, 25 bp, Homo sapien
tacgaaagggtagtgggaacgacac

SEQ ID NO: 119000 - DNA, 25 bp, Homo sapien
tacgaaagggtactgggaacgacac

SEQ ID NO: 119001 - DNA, 25 bp, Homo sapien
gggtaatgtgtatccaaacagagtc

SEQ ID NO: 119002 - DNA, 25 bp, Homo sapien
gggtaatgtgtaaccaaacagagtc

SEQ ID NO: 119003 - DNA, 25 bp, Homo sapien
gttctaagtttacaagaacatcgtc

SEQ ID NO: 119004 - DNA, 25 bp, Homo sapien
gttctaagtttagaagaacatcgtc

SEQ ID NO: 119005 - DNA, 25 bp, Homo sapien
tcttcataggtaatggcccttttct

SEQ ID NO: 119006 - DNA, 25 bp, Homo sapien
tcttcataggtattggcccttttct

SEQ ID NO: 119007 - DNA, 25 bp, Homo sapien
tacataggtattgtatgtatgttcc

SEQ ID NO: 119008 - DNA, 25 bp, Homo sapien
tacataggtattctatgtatgttcc

SEQ ID NO: 119009 - DNA, 25 bp, Homo sapien
acgtctccgtttagaacagttgttc

SEQ ID NO: 119010 - DNA, 25 bp, Homo sapien
acgtctccgttttgaacagttgttc

SEQ ID NO: 119011 - DNA, 25 bp, Homo sapien
tcattgatatcggtgaaatccgttg

SEQ ID NO: 119012 - DNA, 25 bp, Homo sapien
tcattgatatcgctgaaatccgttg

SEQ ID NO: 119013 - DNA, 25 bp, Homo sapien
catgaagtcgacttaattccaacgt

SEQ ID NO: 119014 - DNA, 25 bp, Homo sapien
catgaagtcgacataattccaacgt

SEQ ID NO: 119015 - DNA, 25 bp, Homo sapien
cacctttgtcacttctcgtccagag

SEQ ID NO: 119016 - DNA, 25 bp, Homo sapien
cacctttgtcacatctcgtccagag

SEQ ID NO: 119017 - DNA, 25 bp, Homo sapien
tttataacgttatcggtccggagta

SEQ ID NO: 119018 - DNA, 25 bp, Homo sapien
tttataacgttaacggtccggagta

SEQ ID NO: 119019 - DNA, 25 bp, Homo sapien
tgtttgtccttgtctcccacgggtg

SEQ ID NO: 119020 - DNA, 25 bp, Homo sapien
tgtttgtccttgactcccacgggtg

SEQ ID NO: 119021 - DNA, 25 bp, Homo sapien
ttctggcttttaaggcccgagtgtt

SEQ ID NO: 119022 - DNA, 25 bp, Homo sapien
ttctggcttttatggcccgagtgtt

SEQ ID NO: 119023 - DNA, 25 bp, Homo sapien
cgttgcctcatgtcacgactggggt

SEQ ID NO: 119024 - DNA, 25 bp, Homo sapien
cgttgcctcatgacacgactggggt

SEQ ID NO: 119025 - DNA, 25 bp, Homo sapien
ggtgtctccggagacccctcggaag

SEQ ID NO: 119026 - DNA, 25 bp, Homo sapien
ggtgtctccggacacccctcggaag

SEQ ID NO: 119027 - DNA, 25 bp, Homo sapien
cgggccgtggacttccctccagaag

SEQ ID NO: 119028 - DNA, 25 bp, Homo sapien
cgggccgtggacatccctccagaag

SEQ ID NO: 119029 - DNA, 25 bp, Homo sapien
gtggcgaaagaactacgtaaacatc

SEQ ID NO: 119030 - DNA, 25 bp, Homo sapien
gtggcgaaagaagtacgtaaacatc

SEQ ID NO: 119031 - DNA, 25 bp, Homo sapien
cttacccgtcaagacgtcacatgtg

SEQ ID NO: 119032 - DNA, 25 bp, Homo sapien
cttacccgtcaacacgtcacatgtg

SEQ ID NO: 119033 - DNA, 25 bp, Homo sapien
tctctagtttacaccagtctagagt

SEQ ID NO: 119034 - DNA, 25 bp, Homo sapien
tctctagtttactccagtctagagt

SEQ ID NO: 119035 - DNA, 25 bp, Homo sapien
ctgtatccatgtttgtatcacctgg

SEQ ID NO: 119036 - DNA, 25 bp, Homo sapien
ctgtatccatgtatgtatcacctgg

SEQ ID NO: 119037 - DNA, 25 bp, Homo sapien
tgttttcacttgtttaacaccagag

SEQ ID NO: 119038 - DNA, 25 bp, Homo sapien
tgttttcacttgattaacaccagag

SEQ ID NO: 119039 - DNA, 25 bp, Homo sapien
tgttgtgctatttcgaaacactaat

SEQ ID NO: 119040 - DNA, 25 bp, Homo sapien
tgttgtgctattacgaaacactaat

SEQ ID NO: 119041 - DNA, 25 bp, Homo sapien
ggctcgcgttttaaaccgcgctact

SEQ ID NO: 119042 - DNA, 25 bp, Homo sapien
ggctcgcgtttttaaccgcgctact

SEQ ID NO: 119043 - DNA, 25 bp, Homo sapien
agaaagttacgtggtgttctcccgt

SEQ ID NO: 119044 - DNA, 25 bp, Homo sapien
agaaagttacgtcgtgttctcccgt

SEQ ID NO: 119045 - DNA, 25 bp, Homo sapien
gaacgtgatagtaagttctcctacg

SEQ ID NO: 119046 - DNA, 25 bp, Homo sapien
gaacgtgatagttagttctcctacg

SEQ ID NO: 119047 - DNA, 25 bp, Homo sapien
aagtaggagggtaaaggtctacctc

SEQ ID NO: 119048 - DNA, 25 bp, Homo sapien
aagtaggagggttaaggtctacctc

SEQ ID NO: 119049 - DNA, 25 bp, Homo sapien
gccagtggtcgtgtaaagggtcctc

SEQ ID NO: 119050 - DNA, 25 bp, Homo sapien
gccagtggtcgtctaaagggtcctc

SEQ ID NO: 119051 - DNA, 25 bp, Homo sapien
aaccatttcgtgtacaaggggtcct

SEQ ID NO: 119052 - DNA, 25 bp, Homo sapien
aaccatttcgtgaacaaggggtcct

SEQ ID NO: 119053 - DNA, 25 bp, Homo sapien
taaatgagtgtccaagttccgtcaa

SEQ ID NO: 119054 - DNA, 25 bp, Homo sapien
taaatgagtgtcgaagttccgtcaa

SEQ ID NO: 119055 - DNA, 25 bp, Homo sapien
attcggtgtacctcgtcttctaagg

SEQ ID NO: 119056 - DNA, 25 bp, Homo sapien
attcggtgtaccacgtcttctaagg

SEQ ID NO: 119057 - DNA, 25 bp, Homo sapien
aatgatatacgcaccgtccacgaag

SEQ ID NO: 119058 - DNA, 25 bp, Homo sapien
aatgatatacgctccgtccacgaag

SEQ ID NO: 119059 - DNA, 25 bp, Homo sapien
taaaaaagtgttaactcccgacgat

SEQ ID NO: 119060 - DNA, 25 bp, Homo sapien
taaaaaagtgtttactcccgacgat

SEQ ID NO: 119061 - DNA, 25 bp, Homo sapien
tcgcgaaacatactacactttagga

SEQ ID NO: 119062 - DNA, 25 bp, Homo sapien
tcgcgaaacatagtacactttagga

SEQ ID NO: 119063 - DNA, 25 bp, Homo sapien
cgtaaggacggacacatcgtccgcc

SEQ ID NO: 119064 - DNA, 25 bp, Homo sapien
cgtaaggacggagacatcgtccgcc

SEQ ID NO: 119065 - DNA, 25 bp, Homo sapien
aaaggggactgatctatgacacacg

SEQ ID NO: 119066 - DNA, 25 bp, Homo sapien
aaaggggactgaactatgacacacg

SEQ ID NO: 119067 - DNA, 25 bp, Homo sapien
agttgtacgtctttcaacgctacgg

SEQ ID NO: 119068 - DNA, 25 bp, Homo sapien
agttgtacgtctatcaacgctacgg

SEQ ID NO: 119069 - DNA, 25 bp, Homo sapien
ggaagttcctctgtcggcgtcacgg

SEQ ID NO: 119070 - DNA, 25 bp, Homo sapien
ggaagttcctctctcggcgtcacgg

SEQ ID NO: 119071 - DNA, 25 bp, Homo sapien
ggtaggtctctcctctgagttccta

SEQ ID NO: 119072 - DNA, 25 bp, Homo sapien
ggtaggtctctcgtctgagttccta

SEQ ID NO: 119073 - DNA, 25 bp, Homo sapien
cgggacgtcccagtcgattccgtgt

SEQ ID NO: 119074 - DNA, 25 bp, Homo sapien
cgggacgtcccactcgattccgtgt

SEQ ID NO: 119075 - DNA, 25 bp, Homo sapien
gaccctgaccaacgtcttcttaggt

SEQ ID NO: 119076 - DNA, 25 bp, Homo sapien
gaccctgaccaaggtcttcttaggt

SEQ ID NO: 119077 - DNA, 25 bp, Homo sapien
tcttactcccaggactcaacagaag

SEQ ID NO: 119078 - DNA, 25 bp, Homo sapien
tcttactcccagcactcaacagaag

SEQ ID NO: 119079 - DNA, 25 bp, Homo sapien
gttcaactccggtattctaaaaacg

SEQ ID NO: 119080 - DNA, 25 bp, Homo sapien
gttcaactccggaattctaaaaacg

SEQ ID NO: 119081 - DNA, 25 bp, Homo sapien
gggaactgtccctcgtttgtctgcg

SEQ ID NO: 119082 - DNA, 25 bp, Homo sapien
gggaactgtcccacgtttgtctgcg

SEQ ID NO: 119083 - DNA, 25 bp, Homo sapien
gaccgacgaggtctctatgtctgcg

SEQ ID NO: 119084 - DNA, 25 bp, Homo sapien
gaccgacgaggtgtctatgtctgcg

SEQ ID NO: 119085 - DNA, 25 bp, Homo sapien
gactgacatgtctttagttactagg

SEQ ID NO: 119086 - DNA, 25 bp, Homo sapien
gactgacatgtcattagttactagg

SEQ ID NO: 119087 - DNA, 25 bp, Homo sapien
aaagtggacgttttcgaggaaccgt

SEQ ID NO: 119088 - DNA, 25 bp, Homo sapien
aaagtggacgttatcgaggaaccgt

SEQ ID NO: 119089 - DNA, 25 bp, Homo sapien
tctaaggacgagttaaagggcacac

SEQ ID NO: 119090 - DNA, 25 bp, Homo sapien
tctaaggacgagataaagggcacac

SEQ ID NO: 119091 - DNA, 25 bp, Homo sapien
taaagtgtcgggtagacgtgtcccc

SEQ ID NO: 119092 - DNA, 25 bp, Homo sapien
taaagtgtcgggaagacgtgtcccc

SEQ ID NO: 119093 - DNA, 25 bp, Homo sapien
tgtgtcagtcatgactttacgttac

SEQ ID NO: 119094 - DNA, 25 bp, Homo sapien
tgtgtcagtcatcactttacgttac

SEQ ID NO: 119095 - DNA, 25 bp, Homo sapien
gcgtttgtagtcaattcatttgaca

SEQ ID NO: 119096 - DNA, 25 bp, Homo sapien
gcgtttgtagtctattcatttgaca

SEQ ID NO: 119097 - DNA, 25 bp, Homo sapien
cccttgtttgaaacactttgactag

SEQ ID NO: 119098 - DNA, 25 bp, Homo sapien
cccttgtttgaatcactttgactag

SEQ ID NO: 119099 - DNA, 25 bp, Homo sapien
cctctttgtgagagcctcgttgttt

SEQ ID NO: 119100 - DNA, 25 bp, Homo sapien
cctctttgtgagtgcctcgttgttt

SEQ ID NO: 119101 - DNA, 25 bp, Homo sapien
caaacgagtctaacccgtcggatac

SEQ ID NO: 119102 - DNA, 25 bp, Homo sapien
caaacgagtctatcccgtcggatac

SEQ ID NO: 119103 - DNA, 25 bp, Homo sapien
catccgttcagttaactcgagtgtc

SEQ ID NO: 119104 - DNA, 25 bp, Homo sapien
catccgttcagtaaactcgagtgtc

SEQ ID NO: 119105 - DNA, 25 bp, Homo sapien
gttcagaagtccaacaaatatctgt

SEQ ID NO: 119106 - DNA, 25 bp, Homo sapien
gttcagaagtcctacaaatatctgt

SEQ ID NO: 119107 - DNA, 25 bp, Homo sapien
gtgtctcggaagtgaaacctctttc

SEQ ID NO: 119108 - DNA, 25 bp, Homo sapien
gtgtctcggaagagaaacctctttc

SEQ ID NO: 119109 - DNA, 25 bp, Homo sapien
gttttcacacacgatcctttgttcg

SEQ ID NO: 119110 - DNA, 25 bp, Homo sapien
gttttcacacaccatcctttgttcg

SEQ ID NO: 119111 - DNA, 25 bp, Homo sapien
tcagttagtctatttcgtgtaatac

SEQ ID NO: 119112 - DNA, 25 bp, Homo sapien
tcagttagtctaattcgtgtaatac

SEQ ID NO: 119113 - DNA, 25 bp, Homo sapien
ctcttcgtacataacgtgtcggtaa

SEQ ID NO: 119114 - DNA, 25 bp, Homo sapien
ctcttcgtacattacgtgtcggtaa

SEQ ID NO: 119115 - DNA, 25 bp, Homo sapien
cactttagacctgttcgtggagaga

SEQ ID NO: 119116 - DNA, 25 bp, Homo sapien
cactttagacctcttcgtggagaga

SEQ ID NO: 119117 - DNA, 25 bp, Homo sapien
catagtgtccgtcactggtgggaac

SEQ ID NO: 119118 - DNA, 25 bp, Homo sapien
catagtgtccgtgactggtgggaac

SEQ ID NO: 119119 - DNA, 25 bp, Homo sapien
atgtcgtccacattatcgactaaag

SEQ ID NO: 119120 - DNA, 25 bp, Homo sapien
atgtcgtccacaatatcgactaaag

SEQ ID NO: 119121 - DNA, 25 bp, Homo sapien
tctacgtcctgactctactaacagg

SEQ ID NO: 119122 - DNA, 25 bp, Homo sapien
tctacgtcctgagtctactaacagg

SEQ ID NO: 119123 - DNA, 25 bp, Homo sapien
aggacgtcctagagtcctcgataca

SEQ ID NO: 119124 - DNA, 25 bp, Homo sapien
aggacgtcctagtgtcctcgataca

SEQ ID NO: 119125 - DNA, 25 bp, Homo sapien
cggctgtggagacttactcctcagt

SEQ ID NO: 119126 - DNA, 25 bp, Homo sapien
cggctgtggagagttactcctcagt

SEQ ID NO: 119127 - DNA, 25 bp, Homo sapien
cgcctagtgacagtgtaagtccccg

SEQ ID NO: 119128 - DNA, 25 bp, Homo sapien
cgcctagtgacactgtaagtccccg

SEQ ID NO: 119129 - DNA, 25 bp, Homo sapien
aggaacgtccacatcgtgaactccc

SEQ ID NO: 119130 - DNA, 25 bp, Homo sapien
aggaacgtccacttcgtgaactccc

SEQ ID NO: 119131 - DNA, 25 bp, Homo sapien
gaacaaatcgacactggacgtcccg

SEQ ID NO: 119132 - DNA, 25 bp, Homo sapien
gaacaaatcgactctggacgtcccg

SEQ ID NO: 119133 - DNA, 25 bp, Homo sapien
agttaagattactgtcagaacacaa

SEQ ID NO: 119134 - DNA, 25 bp, Homo sapien
agttaagattacagtcagaacacaa

SEQ ID NO: 119135 - DNA, 25 bp, Homo sapien
acaagacttacgtcaggtatacaga

SEQ ID NO: 119136 - DNA, 25 bp, Homo sapien
acaagacttacgacaggtatacaga

SEQ ID NO: 119137 - DNA, 25 bp, Homo sapien
tccaagggtcataaatcagtgatca

SEQ ID NO: 119138 - DNA, 25 bp, Homo sapien
tccaagggtcattaatcagtgatca

SEQ ID NO: 119139 - DNA, 25 bp, Homo sapien
agggtgtacggtacatgttacatca

SEQ ID NO: 119140 - DNA, 25 bp, Homo sapien
agggtgtacggttcatgttacatca

SEQ ID NO: 119141 - DNA, 25 bp, Homo sapien
attcggtcggagtttcctattttaa

SEQ ID NO: 119142 - DNA, 25 bp, Homo sapien
attcggtcggagattcctattttaa

SEQ ID NO: 119143 - DNA, 25 bp, Homo sapien
gaaggaaaaattccatctactcaga

SEQ ID NO: 119144 - DNA, 25 bp, Homo sapien
gaaggaaaaattgcatctactcaga

SEQ ID NO: 119145 - DNA, 25 bp, Homo sapien
agaaggaaattgtaactctacagac

SEQ ID NO: 119146 - DNA, 25 bp, Homo sapien
agaaggaaattgaaactctacagac

SEQ ID NO: 119147 - DNA, 25 bp, Homo sapien
gtttaaggtaaaacccatattcaga

SEQ ID NO: 119148 - DNA, 25 bp, Homo sapien
gtttaaggtaaatcccatattcaga

SEQ ID NO: 119149 - DNA, 25 bp, Homo sapien
acgagagtagcgatcccatttggta

SEQ ID NO: 119150 - DNA, 25 bp, Homo sapien
acgagagtagcgttcccatttggta

SEQ ID NO: 119151 - DNA, 25 bp, Homo sapien
gagtatcacacttccgtccatcggg

SEQ ID NO: 119152 - DNA, 25 bp, Homo sapien
gagtatcacactaccgtccatcggg

SEQ ID NO: 119153 - DNA, 25 bp, Homo sapien
tgggctcacttactgtccctggtag

SEQ ID NO: 119154 - DNA, 25 bp, Homo sapien
tgggctcacttagtgtccctggtag

SEQ ID NO: 119155 - DNA, 25 bp, Homo sapien
cgtgtggtggactccgtcccggccg

SEQ ID NO: 119156 - DNA, 25 bp, Homo sapien
cgtgtggtggacaccgtcccggccg

SEQ ID NO: 119157 - DNA, 25 bp, Homo sapien
acgagtgtcgtgaccggacccgcgc

SEQ ID NO: 119158 - DNA, 25 bp, Homo sapien
acgagtgtcgtgtccggacccgcgc

SEQ ID NO: 119159 - DNA, 25 bp, Homo sapien
gtgtctgaggtcattttccctcgac

SEQ ID NO: 119160 - DNA, 25 bp, Homo sapien
gtgtctgaggtctttttccctcgac

SEQ ID NO: 119161 - DNA, 25 bp, Homo sapien
atgttagtgtcgagaaagactctcc

SEQ ID NO: 119162 - DNA, 25 bp, Homo sapien
atgttagtgtcgtgaaagactctcc

SEQ ID NO: 119163 - DNA, 25 bp, Homo sapien
acttggtggaagaaagacactcgtc

SEQ ID NO: 119164 - DNA, 25 bp, Homo sapien
acttggtggaagtaagacactcgtc

SEQ ID NO: 119165 - DNA, 25 bp, Homo sapien
acggagctaagacgagaagcatcta

SEQ ID NO: 119166 - DNA, 25 bp, Homo sapien
acggagctaagaggagaagcatcta

SEQ ID NO: 119167 - DNA, 25 bp, Homo sapien
aaggtatgaggtgagaaaccttcac

SEQ ID NO: 119168 - DNA, 25 bp, Homo sapien
aaggtatgaggtcagaaaccttcac

SEQ ID NO: 119169 - DNA, 25 bp, Homo sapien
agtggtgtcattgaccttctgtcag

SEQ ID NO: 119170 - DNA, 25 bp, Homo sapien
agtggtgtcattcaccttctgtcag

SEQ ID NO: 119171 - DNA, 25 bp, Homo sapien
acggcgtacgtcacaacaattagaa

SEQ ID NO: 119172 - DNA, 25 bp, Homo sapien
acggcgtacgtctcaacaattagaa

SEQ ID NO: 119173 - DNA, 25 bp, Homo sapien
ctcggactgttcacctgtccactaa

SEQ ID NO: 119174 - DNA, 25 bp, Homo sapien
ctcggactgttctcctgtccactaa

SEQ ID NO: 119175 - DNA, 25 bp, Homo sapien
tgtgctgttgtggttgtaacagtcc

SEQ ID NO: 119176 - DNA, 25 bp, Homo sapien
tgtgctgttgtgcttgtaacagtcc

SEQ ID NO: 119177 - DNA, 25 bp, Homo sapien
ttgtggacgttcgtatttacgatca

SEQ ID NO: 119178 - DNA, 25 bp, Homo sapien
ttgtggacgttcctatttacgatca

SEQ ID NO: 119179 - DNA, 25 bp, Homo sapien
gtctttgacccgtattataagcact

SEQ ID NO: 119180 - DNA, 25 bp, Homo sapien
gtctttgacccgaattataagcact

SEQ ID NO: 119181 - DNA, 25 bp, Homo sapien
ttttcccggacatctgttcggctct

SEQ ID NO: 119182 - DNA, 25 bp, Homo sapien
ttttcccggacaactgttcggctct

SEQ ID NO: 119183 - DNA, 25 bp, Homo sapien
tcttacccagacactgaccgacgaa

SEQ ID NO: 119184 - DNA, 25 bp, Homo sapien
tcttacccagactctgaccgacgaa

SEQ ID NO: 119185 - DNA, 25 bp, Homo sapien
tgtccgtacacagtggtacgggtga

SEQ ID NO: 119186 - DNA, 25 bp, Homo sapien
tgtccgtacacactggtacgggtga

SEQ ID NO: 119187 - DNA, 25 bp, Homo sapien
cgtggtcctcctactgaacgggcgg

SEQ ID NO: 119188 - DNA, 25 bp, Homo sapien
cgtggtcctccttctgaacgggcgg

SEQ ID NO: 119189 - DNA, 25 bp, Homo sapien
aatttttagtcttccgttctggtgg

SEQ ID NO: 119190 - DNA, 25 bp, Homo sapien
aatttttagtctaccgttctggtgg

SEQ ID NO: 119191 - DNA, 25 bp, Homo sapien
tttttaatgacgagagttcctcgga

SEQ ID NO: 119192 - DNA, 25 bp, Homo sapien
tttttaatgacgtgagttcctcgga

SEQ ID NO: 119193 - DNA, 25 bp, Homo sapien
ttattttcaacctttagacgtcgga

SEQ ID NO: 119194 - DNA, 25 bp, Homo sapien
ttattttcaaccattagacgtcgga

SEQ ID NO: 119195 - DNA, 25 bp, Homo sapien
ttttgacatgtctcacagacgacga

SEQ ID NO: 119196 - DNA, 25 bp, Homo sapien
ttttgacatgtcacacagacgacga

SEQ ID NO: 119197 - DNA, 25 bp, Homo sapien
ctttcttagaagtccggagacgaga

SEQ ID NO: 119198 - DNA, 25 bp, Homo sapien
ctttcttagaagaccggagacgaga

SEQ ID NO: 119199 - DNA, 25 bp, Homo sapien
agactaaggaaaggacctcggggac

SEQ ID NO: 119200 - DNA, 25 bp, Homo sapien
agactaaggaaacgacctcggggac

SEQ ID NO: 119201 - DNA, 25 bp, Homo sapien
attacggcaaccagtcttagggcgt

SEQ ID NO: 119202 - DNA, 25 bp, Homo sapien
attacggcaacctgtcttagggcgt

SEQ ID NO: 119203 - DNA, 25 bp, Homo sapien
cacgatcggaaacaggttatgtctc

SEQ ID NO: 119204 - DNA, 25 bp, Homo sapien
cacgatcggaaagaggttatgtctc

SEQ ID NO: 119205 - DNA, 25 bp, Homo sapien
cccactcggtcaagggttccatgtg

SEQ ID NO: 119206 - DNA, 25 bp, Homo sapien
cccactcggtcatgggttccatgtg

SEQ ID NO: 119207 - DNA, 25 bp, Homo sapien
gacaaagtgtcattttatcaaagtc

SEQ ID NO: 119208 - DNA, 25 bp, Homo sapien
gacaaagtgtcaatttatcaaagtc

SEQ ID NO: 119209 - DNA, 25 bp, Homo sapien
gggcagagatcgaaatttacaaacc

SEQ ID NO: 119210 - DNA, 25 bp, Homo sapien
gggcagagatcgtaatttacaaacc

SEQ ID NO: 119211 - DNA, 25 bp, Homo sapien
gaagtccaggacctgttctattatt

SEQ ID NO: 119212 - DNA, 25 bp, Homo sapien
gaagtccaggacgtgttctattatt

SEQ ID NO: 119213 - DNA, 25 bp, Homo sapien
aattctcacatagtcagtcccaggt

SEQ ID NO: 119214 - DNA, 25 bp, Homo sapien
aattctcacatactcagtcccaggt

SEQ ID NO: 119215 - DNA, 25 bp, Homo sapien
gtatgtcgtccaaagtaaaaccaag

SEQ ID NO: 119216 - DNA, 25 bp, Homo sapien
gtatgtcgtccatagtaaaaccaag

SEQ ID NO: 119217 - DNA, 25 bp, Homo sapien
gtcgtccaccacaatatacagtctg

SEQ ID NO: 119218 - DNA, 25 bp, Homo sapien
gtcgtccaccactatatacagtctg

SEQ ID NO: 119219 - DNA, 25 bp, Homo sapien
cgtctctctactgttcccagtgtgt

SEQ ID NO: 119220 - DNA, 25 bp, Homo sapien
cgtctctctactcttcccagtgtgt

SEQ ID NO: 119221 - DNA, 25 bp, Homo sapien
tgaccgggcacacttacgggagccg

SEQ ID NO: 119222 - DNA, 25 bp, Homo sapien
tgaccgggcacagttacgggagccg

SEQ ID NO: 119223 - DNA, 25 bp, Homo sapien
tccctgtgacttcaacggagacggc

SEQ ID NO: 119224 - DNA, 25 bp, Homo sapien
tccctgtgacttgaacggagacggc

SEQ ID NO: 119225 - DNA, 25 bp, Homo sapien
cccccgtcctggaggacgaccacgt

SEQ ID NO: 119226 - DNA, 25 bp, Homo sapien
cccccgtcctggtggacgaccacgt

SEQ ID NO: 119227 - DNA, 25 bp, Homo sapien
atctcaccacctgtctcggagaaag

SEQ ID NO: 119228 - DNA, 25 bp, Homo sapien
atctcaccacctctctcggagaaag

SEQ ID NO: 119229 - DNA, 25 bp, Homo sapien
tccgagtcgggtctctacggggaca

SEQ ID NO: 119230 - DNA, 25 bp, Homo sapien
tccgagtcgggtgtctacggggaca

SEQ ID NO: 119231 - DNA, 25 bp, Homo sapien
tacaaatcggtgatctacagtggga

SEQ ID NO: 119232 - DNA, 25 bp, Homo sapien
tacaaatcggtgttctacagtggga

SEQ ID NO: 119233 - DNA, 25 bp, Homo sapien
ttcacacaccgagtgtcgggtcaaa

SEQ ID NO: 119234 - DNA, 25 bp, Homo sapien
ttcacacaccgactgtcgggtcaaa

SEQ ID NO: 119235 - DNA, 25 bp, Homo sapien
tgacacttaatctcggtctgcgaat

SEQ ID NO: 119236 - DNA, 25 bp, Homo sapien
tgacacttaatcacggtctgcgaat

SEQ ID NO: 119237 - DNA, 25 bp, Homo sapien
taatagtgaccgaggtctgcgactt

SEQ ID NO: 119238 - DNA, 25 bp, Homo sapien
taatagtgaccgtggtctgcgactt

SEQ ID NO: 119239 - DNA, 25 bp, Homo sapien
gaggacgccgtcgtgtctccgtccg

SEQ ID NO: 119240 - DNA, 25 bp, Homo sapien
gaggacgccgtcctgtctccgtccg

SEQ ID NO: 119241 - DNA, 25 bp, Homo sapien
gtcactagtggctccgagattgttc

SEQ ID NO: 119242 - DNA, 25 bp, Homo sapien
gtcactagtggcaccgagattgttc

SEQ ID NO: 119243 - DNA, 25 bp, Homo sapien
tctgtgtgtaccaaagaatctgttc

SEQ ID NO: 119244 - DNA, 25 bp, Homo sapien
tctgtgtgtacctaagaatctgttc

SEQ ID NO: 119245 - DNA, 25 bp, Homo sapien
atggtcgttctagtgtctttgtatc

SEQ ID NO: 119246 - DNA, 25 bp, Homo sapien
atggtcgttctactgtctttgtatc

SEQ ID NO: 119247 - DNA, 25 bp, Homo sapien
aattgtgtttcacatgagttacatc

SEQ ID NO: 119248 - DNA, 25 bp, Homo sapien
aattgtgtttcagatgagttacatc

SEQ ID NO: 119249 - DNA, 25 bp, Homo sapien
tttcctctccgaactcctgagttcg

SEQ ID NO: 119250 - DNA, 25 bp, Homo sapien
tttcctctccgatctcctgagttcg

SEQ ID NO: 119251 - DNA, 25 bp, Homo sapien
tacctttggacgtccgacgtatgtg

SEQ ID NO: 119252 - DNA, 25 bp, Homo sapien
tacctttggacgaccgacgtatgtg

SEQ ID NO: 119253 - DNA, 25 bp, Homo sapien
acatttgtaccgtccacgtcggtct

SEQ ID NO: 119254 - DNA, 25 bp, Homo sapien
acatttgtaccgaccacgtcggtct

SEQ ID NO: 119255 - DNA, 25 bp, Homo sapien
aaccaaactttggatccatctagag

SEQ ID NO: 119256 - DNA, 25 bp, Homo sapien
aaccaaactttgcatccatctagag

SEQ ID NO: 119257 - DNA, 25 bp, Homo sapien
ctaagaaactgtcaaaaacttcagg

SEQ ID NO: 119258 - DNA, 25 bp, Homo sapien
ctaagaaactgtgaaaaacttcagg

SEQ ID NO: 119259 - DNA, 25 bp, Homo sapien
ggacaaagatttatgtaatacccga

SEQ ID NO: 119260 - DNA, 25 bp, Homo sapien
ggacaaagatttttgtaatacccga

SEQ ID NO: 119261 - DNA, 25 bp, Homo sapien
agaaagggttcgtcgggtagacaca

SEQ ID NO: 119262 - DNA, 25 bp, Homo sapien
agaaagggttcgacgggtagacaca

SEQ ID NO: 119263 - DNA, 25 bp, Homo sapien
aacaagaggccgacgggtaacgaga

SEQ ID NO: 119264 - DNA, 25 bp, Homo sapien
aacaagaggccgtcgggtaacgaga

SEQ ID NO: 119265 - DNA, 25 bp, Homo sapien
acctcggacgtatgcccagaagggg

SEQ ID NO: 119266 - DNA, 25 bp, Homo sapien
acctcggacgtaagcccagaagggg

SEQ ID NO: 119267 - DNA, 25 bp, Homo sapien
cctagcgacgtaaggggccgcactc

SEQ ID NO: 119268 - DNA, 25 bp, Homo sapien
cctagcgacgtatggggccgcactc

SEQ ID NO: 119269 - DNA, 25 bp, Homo sapien
catgacacgtaaggaagaccgaccc

SEQ ID NO: 119270 - DNA, 25 bp, Homo sapien
catgacacgtaacgaagaccgaccc

SEQ ID NO: 119271 - DNA, 25 bp, Homo sapien
gcggtcgaggtcagagttcctccca

SEQ ID NO: 119272 - DNA, 25 bp, Homo sapien
gcggtcgaggtctgagttcctccca

SEQ ID NO: 119273 - DNA, 25 bp, Homo sapien
ttcggtgttttagtggttcttccag

SEQ ID NO: 119274 - DNA, 25 bp, Homo sapien
ttcggtgttttactggttcttccag

SEQ ID NO: 119275 - DNA, 25 bp, Homo sapien
aagagtaggtttgtggacctccgga

SEQ ID NO: 119276 - DNA, 25 bp, Homo sapien
aagagtaggtttctggacctccgga

SEQ ID NO: 119277 - DNA, 25 bp, Homo sapien
gatcttaccttggaccgtgtctaat

SEQ ID NO: 119278 - DNA, 25 bp, Homo sapien
gatcttaccttgcaccgtgtctaat

SEQ ID NO: 119279 - DNA, 25 bp, Homo sapien
agtgtcctcttgtccgtctagcaga

SEQ ID NO: 119280 - DNA, 25 bp, Homo sapien
agtgtcctcttgaccgtctagcaga

SEQ ID NO: 119281 - DNA, 25 bp, Homo sapien
aagtcccatttacctcagacgagag

SEQ ID NO: 119282 - DNA, 25 bp, Homo sapien
aagtcccatttagctcagacgagag

SEQ ID NO: 119283 - DNA, 25 bp, Homo sapien
ttatatgccggcacaggagccgaga

SEQ ID NO: 119284 - DNA, 25 bp, Homo sapien
ttatatgccggctcaggagccgaga

SEQ ID NO: 119285 - DNA, 25 bp, Homo sapien
tctggagctgcacgaggcccgagtc

SEQ ID NO: 119286 - DNA, 25 bp, Homo sapien
tctggagctgcaggaggcccgagtc

SEQ ID NO: 119287 - DNA, 25 bp, Homo sapien
tggagtctggtcactgttcccgtct

SEQ ID NO: 119288 - DNA, 25 bp, Homo sapien
tggagtctggtctctgttcccgtct

SEQ ID NO: 119289 - DNA, 25 bp, Homo sapien
tgacactcttgactgaagtcccgtt

SEQ ID NO: 119290 - DNA, 25 bp, Homo sapien
tgacactcttgagtgaagtcccgtt

SEQ ID NO: 119291 - DNA, 25 bp, Homo sapien
cccttgtctccgaagactcagtcgt

SEQ ID NO: 119292 - DNA, 25 bp, Homo sapien
cccttgtctccgtagactcagtcgt

SEQ ID NO: 119293 - DNA, 25 bp, Homo sapien
gcatgctgttccttcgactcagtct

SEQ ID NO: 119294 - DNA, 25 bp, Homo sapien
gcatgctgttccatcgactcagtct

SEQ ID NO: 119295 - DNA, 25 bp, Homo sapien
gaaggacccgtgctccaaatcgacc

SEQ ID NO: 119296 - DNA, 25 bp, Homo sapien
gaaggacccgtggtccaaatcgacc

SEQ ID NO: 119297 - DNA, 25 bp, Homo sapien
caccttgtcgtgcacagattcacgg

SEQ ID NO: 119298 - DNA, 25 bp, Homo sapien
caccttgtcgtggacagattcacgg

SEQ ID NO: 119299 - DNA, 25 bp, Homo sapien
cgatttgactagacataacttaacg

SEQ ID NO: 119300 - DNA, 25 bp, Homo sapien
cgatttgactagtcataacttaacg

SEQ ID NO: 119301 - DNA, 25 bp, Homo sapien
tagataagtcgtaagacgtacatac

SEQ ID NO: 119302 - DNA, 25 bp, Homo sapien
tagataagtcgttagacgtacatac

SEQ ID NO: 119303 - DNA, 25 bp, Homo sapien
gtaccatacagtcctcgcgtcgaac

SEQ ID NO: 119304 - DNA, 25 bp, Homo sapien
gtaccatacagtgctcgcgtcgaac

SEQ ID NO: 119305 - DNA, 25 bp, Homo sapien
ccaatgtctgcgtgtccgagtggag

SEQ ID NO: 119306 - DNA, 25 bp, Homo sapien
ccaatgtctgcgagtccgagtggag

SEQ ID NO: 119307 - DNA, 25 bp, Homo sapien
aaccaactcgggagttttagacaat

SEQ ID NO: 119308 - DNA, 25 bp, Homo sapien
aaccaactcgggtgttttagacaat

SEQ ID NO: 119309 - DNA, 25 bp, Homo sapien
ccttcgtaagggtgttttacgaact

SEQ ID NO: 119310 - DNA, 25 bp, Homo sapien
ccttcgtaagggagttttacgaact

SEQ ID NO: 119311 - DNA, 25 bp, Homo sapien
tccactcgggtgtagtactctcggc

SEQ ID NO: 119312 - DNA, 25 bp, Homo sapien
tccactcgggtgaagtactctcggc

SEQ ID NO: 119313 - DNA, 25 bp, Homo sapien
gggtccacggagagacagatccttt

SEQ ID NO: 119314 - DNA, 25 bp, Homo sapien
gggtccacggagtgacagatccttt

SEQ ID NO: 119315 - DNA, 25 bp, Homo sapien
gaccacgttccaccagagactctta

SEQ ID NO: 119316 - DNA, 25 bp, Homo sapien
gaccacgttccagcagagactctta

SEQ ID NO: 119317 - DNA, 25 bp, Homo sapien
gacgaccgaccgaccgaaaacttct

SEQ ID NO: 119318 - DNA, 25 bp, Homo sapien
gacgaccgaccgtccgaaaacttct

SEQ ID NO: 119319 - DNA, 25 bp, Homo sapien
gacgacgacgggtctcgggtttatt

SEQ ID NO: 119320 - DNA, 25 bp, Homo sapien
gacgacgacgggactcgggtttatt

SEQ ID NO: 119321 - DNA, 25 bp, Homo sapien
ggcgagacctgtactccattctcat

SEQ ID NO: 119322 - DNA, 25 bp, Homo sapien
ggcgagacctgttctccattctcat

SEQ ID NO: 119323 - DNA, 25 bp, Homo sapien
ccgggtctaccttggtttttcaggt

SEQ ID NO: 119324 - DNA, 25 bp, Homo sapien
ccgggtctacctaggtttttcaggt

SEQ ID NO: 119325 - DNA, 25 bp, Homo sapien
gtcgtttgccagtcttctacttgtt

SEQ ID NO: 119326 - DNA, 25 bp, Homo sapien
gtcgtttgccagacttctacttgtt

SEQ ID NO: 119327 - DNA, 25 bp, Homo sapien
atctttgactagttttctggtaaca

SEQ ID NO: 119328 - DNA, 25 bp, Homo sapien
atctttgactagatttctggtaaca

SEQ ID NO: 119329 - DNA, 25 bp, Homo sapien
tcggtgtcttgagttggcattaaac

SEQ ID NO: 119330 - DNA, 25 bp, Homo sapien
tcggtgtcttgacttggcattaaac

SEQ ID NO: 119331 - DNA, 25 bp, Homo sapien
gcctgtggggatatccgggtttcac

SEQ ID NO: 119332 - DNA, 25 bp, Homo sapien
gcctgtggggatttccgggtttcac

SEQ ID NO: 119333 - DNA, 25 bp, Homo sapien
ttgtggtggatcaaaccgttcttta

SEQ ID NO: 119334 - DNA, 25 bp, Homo sapien
ttgtggtggatctaaccgttcttta

SEQ ID NO: 119335 - DNA, 25 bp, Homo sapien
tggggtgctcccacgtgtgttcgac

SEQ ID NO: 119336 - DNA, 25 bp, Homo sapien
tggggtgctccctcgtgtgttcgac

SEQ ID NO: 119337 - DNA, 25 bp, Homo sapien
tacttgatcccattcacttatgtga

SEQ ID NO: 119338 - DNA, 25 bp, Homo sapien
tacttgatcccaatcacttatgtga

SEQ ID NO: 119339 - DNA, 25 bp, Homo sapien
cggtctttccgtatctatctgggtt

SEQ ID NO: 119340 - DNA, 25 bp, Homo sapien
cggtctttccgtttctatctgggtt

SEQ ID NO: 119341 - DNA, 25 bp, Homo sapien
gttcttcgtctctgttcggtgggtt

SEQ ID NO: 119342 - DNA, 25 bp, Homo sapien
gttcttcgtctcagttcggtgggtt

SEQ ID NO: 119343 - DNA, 25 bp, Homo sapien
ttttgttccggacgtaggtattatc

SEQ ID NO: 119344 - DNA, 25 bp, Homo sapien
ttttgttccggaggtaggtattatc

SEQ ID NO: 119345 - DNA, 25 bp, Homo sapien
ttgtagtttccgtgaatggtttcac

SEQ ID NO: 119346 - DNA, 25 bp, Homo sapien
ttgtagtttccgagaatggtttcac

SEQ ID NO: 119347 - DNA, 25 bp, Homo sapien
tttgtgactccgagaaaattaacga

SEQ ID NO: 119348 - DNA, 25 bp, Homo sapien
tttgtgactccgtgaaaattaacga

SEQ ID NO: 119349 - DNA, 25 bp, Homo sapien
tgtgctaccgttactaattttaccg

SEQ ID NO: 119350 - DNA, 25 bp, Homo sapien
tgtgctaccgtttctaattttaccg

SEQ ID NO: 119351 - DNA, 25 bp, Homo sapien
cttagaacggttacttctcttcccg

SEQ ID NO: 119352 - DNA, 25 bp, Homo sapien
cttagaacggtttcttctcttcccg

SEQ ID NO: 119353 - DNA, 25 bp, Homo sapien
agagactaaagattcctttttgccg

SEQ ID NO: 119354 - DNA, 25 bp, Homo sapien
agagactaaagaatcctttttgccg

SEQ ID NO: 119355 - DNA, 25 bp, Homo sapien
agtgacaaaaatcctttgtttatcg

SEQ ID NO: 119356 - DNA, 25 bp, Homo sapien
agtgacaaaaatgctttgtttatcg

SEQ ID NO: 119357 - DNA, 25 bp, Homo sapien
acaaagaattctcacctgtcgtatg

SEQ ID NO: 119358 - DNA, 25 bp, Homo sapien
acaaagaattctgacctgtcgtatg

SEQ ID NO: 119359 - DNA, 25 bp, Homo sapien
ccagaaattaagtttcgtcccttcg

SEQ ID NO: 119360 - DNA, 25 bp, Homo sapien
ccagaaattaagattcgtcccttcg

SEQ ID NO: 119361 - DNA, 25 bp, Homo sapien
acactaatatgttttacttcacctg

SEQ ID NO: 119362 - DNA, 25 bp, Homo sapien
acactaatatgtattacttcacctg

SEQ ID NO: 119363 - DNA, 25 bp, Homo sapien
aggggatgtgactgtactgttaacc

SEQ ID NO: 119364 - DNA, 25 bp, Homo sapien
aggggatgtgacagtactgttaacc

SEQ ID NO: 119365 - DNA, 25 bp, Homo sapien
cgacggtttgtgactcggttttcgg

SEQ ID NO: 119366 - DNA, 25 bp, Homo sapien
cgacggtttgtgtctcggttttcgg

SEQ ID NO: 119367 - DNA, 25 bp, Homo sapien
aggtgttcagttcaccggtgtagga

SEQ ID NO: 119368 - DNA, 25 bp, Homo sapien
aggtgttcagttgaccggtgtagga

SEQ ID NO: 119369 - DNA, 25 bp, Homo sapien
cgccggtccgcatccgacaaagtgt

SEQ ID NO: 119370 - DNA, 25 bp, Homo sapien
cgccggtccgcaaccgacaaagtgt

SEQ ID NO: 119371 - DNA, 25 bp, Homo sapien
gtttatgtccctaccgcggagagtc

SEQ ID NO: 119372 - DNA, 25 bp, Homo sapien
gtttatgtcccttccgcggagagtc

SEQ ID NO: 119373 - DNA, 25 bp, Homo sapien
cgtcctcagaaccattccgagggga

SEQ ID NO: 119374 - DNA, 25 bp, Homo sapien
cgtcctcagaacgattccgagggga

SEQ ID NO: 119375 - DNA, 25 bp, Homo sapien
tcagtatgtcggttgacaagtttac

SEQ ID NO: 119376 - DNA, 25 bp, Homo sapien
tcagtatgtcggatgacaagtttac

SEQ ID NO: 119377 - DNA, 25 bp, Homo sapien
ttgcacaactggatttctccatgtc

SEQ ID NO: 119378 - DNA, 25 bp, Homo sapien
ttgcacaactggttttctccatgtc

SEQ ID NO: 119379 - DNA, 25 bp, Homo sapien
taagtgtgtttcctctaccctatgt

SEQ ID NO: 119380 - DNA, 25 bp, Homo sapien
taagtgtgtttcgtctaccctatgt

SEQ ID NO: 119381 - DNA, 25 bp, Homo sapien
tcgtaatgtctcttccgttcccttt

SEQ ID NO: 119382 - DNA, 25 bp, Homo sapien
tcgtaatgtctcatccgttcccttt

SEQ ID NO: 119383 - DNA, 25 bp, Homo sapien
cctgaggttcctcgactccctcggt

SEQ ID NO: 119384 - DNA, 25 bp, Homo sapien
cctgaggttcctggactccctcggt

SEQ ID NO: 119385 - DNA, 25 bp, Homo sapien
aatcgtggggaccggttccagtagg

SEQ ID NO: 119386 - DNA, 25 bp, Homo sapien
aatcgtggggacgggttccagtagg

SEQ ID NO: 119387 - DNA, 25 bp, Homo sapien
atctccagggggttcgacacgaacg

SEQ ID NO: 119388 - DNA, 25 bp, Homo sapien
atctccagggggatcgacacgaacg

SEQ ID NO: 119389 - DNA, 25 bp, Homo sapien
ctcttacccccaggttcacggatag

SEQ ID NO: 119390 - DNA, 25 bp, Homo sapien
ctcttacccccacgttcacggatag

SEQ ID NO: 119391 - DNA, 25 bp, Homo sapien
actcctctcagtgtcgacaggtctg

SEQ ID NO: 119392 - DNA, 25 bp, Homo sapien
actcctctcagtctcgacaggtctg

SEQ ID NO: 119393 - DNA, 25 bp, Homo sapien
accctaactcccagtgtagtaaccg

SEQ ID NO: 119394 - DNA, 25 bp, Homo sapien
accctaactccctgtgtagtaaccg

SEQ ID NO: 119395 - DNA, 25 bp, Homo sapien
acacatgactacatgttgtgtaaca

SEQ ID NO: 119396 - DNA, 25 bp, Homo sapien
acacatgactacttgttgtgtaaca

SEQ ID NO: 119397 - DNA, 25 bp, Homo sapien
cttacttgtttacagtggacgtata

SEQ ID NO: 119398 - DNA, 25 bp, Homo sapien
cttacttgtttagagtggacgtata

SEQ ID NO: 119399 - DNA, 25 bp, Homo sapien
gtcgatctacacgagtgacatacga

SEQ ID NO: 119400 - DNA, 25 bp, Homo sapien
gtcgatctacaccagtgacatacga

SEQ ID NO: 119401 - DNA, 25 bp, Homo sapien
cgatcacacccgctcagagtagaag

SEQ ID NO: 119402 - DNA, 25 bp, Homo sapien
cgatcacacccggtcagagtagaag

SEQ ID NO: 119403 - DNA, 25 bp, Homo sapien
ctcgagaagctccatcactagtttg

SEQ ID NO: 119404 - DNA, 25 bp, Homo sapien
ctcgagaagctcgatcactagtttg

SEQ ID NO: 119405 - DNA, 25 bp, Homo sapien
agtgacaatgtttgttccaccgttg

SEQ ID NO: 119406 - DNA, 25 bp, Homo sapien
agtgacaatgttagttccaccgttg

SEQ ID NO: 119407 - DNA, 25 bp, Homo sapien
tacgtaaatccttttcgtcatcatt

SEQ ID NO: 119408 - DNA, 25 bp, Homo sapien
tacgtaaatcctattcgtcatcatt

SEQ ID NO: 119409 - DNA, 25 bp, Homo sapien
gtatcctcgtccacttcaagagttt

SEQ ID NO: 119410 - DNA, 25 bp, Homo sapien
gtatcctcgtcctcttcaagagttt

SEQ ID NO: 119411 - DNA, 25 bp, Homo sapien
tacaacgtcttccaagtaaggacat

SEQ ID NO: 119412 - DNA, 25 bp, Homo sapien
tacaacgtcttcgaagtaaggacat

SEQ ID NO: 119413 - DNA, 25 bp, Homo sapien
acgcctctttcgagatacgactctt

SEQ ID NO: 119414 - DNA, 25 bp, Homo sapien
acgcctctttcgtgatacgactctt

SEQ ID NO: 119415 - DNA, 25 bp, Homo sapien
ctggggttgtgtctcgagacatctt

SEQ ID NO: 119416 - DNA, 25 bp, Homo sapien
ctggggttgtgtgtcgagacatctt

SEQ ID NO: 119417 - DNA, 25 bp, Homo sapien
taggacggtttgttgatgtttagtt

SEQ ID NO: 119418 - DNA, 25 bp, Homo sapien
taggacggtttgatgatgtttagtt

SEQ ID NO: 119419 - DNA, 25 bp, Homo sapien
cctctgtccgtcttatagtttatgt

SEQ ID NO: 119420 - DNA, 25 bp, Homo sapien
cctctgtccgtcatatagtttatgt

SEQ ID NO: 119421 - DNA, 25 bp, Homo sapien
ccaccgtttaatcgttacttaaggt

SEQ ID NO: 119422 - DNA, 25 bp, Homo sapien
ccaccgtttaatggttacttaaggt

SEQ ID NO: 119423 - DNA, 25 bp, Homo sapien
aacccggtggttgtgagatgaacga

SEQ ID NO: 119424 - DNA, 25 bp, Homo sapien
aacccggtggttctgagatgaacga

SEQ ID NO: 119425 - DNA, 25 bp, Homo sapien
ttccggggtcttcactgcgtcggga

SEQ ID NO: 119426 - DNA, 25 bp, Homo sapien
ttccggggtcttgactgcgtcggga

SEQ ID NO: 119427 - DNA, 25 bp, Homo sapien
gccccggtctcatgagccgtcctga

SEQ ID NO: 119428 - DNA, 25 bp, Homo sapien
gccccggtctcaagagccgtcctga

SEQ ID NO: 119429 - DNA, 25 bp, Homo sapien
cccacagtttaatggttcatcttgt

SEQ ID NO: 119430 - DNA, 25 bp, Homo sapien
cccacagtttaaaggttcatcttgt

SEQ ID NO: 119431 - DNA, 25 bp, Homo sapien
atctcaaccttagaggttgtcattg

SEQ ID NO: 119432 - DNA, 25 bp, Homo sapien
atctcaaccttacaggttgtcattg

SEQ ID NO: 119433 - DNA, 25 bp, Homo sapien
tactccatactctggttgtacctgg

SEQ ID NO: 119434 - DNA, 25 bp, Homo sapien
tactccatactcaggttgtacctgg

SEQ ID NO: 119435 - DNA, 25 bp, Homo sapien
gtttataaacttttgcgtcccctgg

SEQ ID NO: 119436 - DNA, 25 bp, Homo sapien
gtttataaacttatgcgtcccctgg

SEQ ID NO: 119437 - DNA, 25 bp, Homo sapien
gtaagacttattctaccgtcacaag

SEQ ID NO: 119438 - DNA, 25 bp, Homo sapien
gtaagacttattgtaccgtcacaag

SEQ ID NO: 119439 - DNA, 25 bp, Homo sapien
agtcaaccctctgtatcgacagtca

SEQ ID NO: 119440 - DNA, 25 bp, Homo sapien
agtcaaccctctctatcgacagtca

SEQ ID NO: 119441 - DNA, 25 bp, Homo sapien
tagacccacatctgtcgacctacga

SEQ ID NO: 119442 - DNA, 25 bp, Homo sapien
tagacccacatcagtcgacctacga

SEQ ID NO: 119443 - DNA, 25 bp, Homo sapien
tgaaccgtaagacgtcgcgacacat

SEQ ID NO: 119444 - DNA, 25 bp, Homo sapien
tgaaccgtaagaggtcgcgacacat

SEQ ID NO: 119445 - DNA, 25 bp, Homo sapien
tttctctgtcagtcgtcgacgcagt

SEQ ID NO: 119446 - DNA, 25 bp, Homo sapien
tttctctgtcagacgtcgacgcagt

SEQ ID NO: 119447 - DNA, 25 bp, Homo sapien
taggtccggtgttcccttcgggagt

SEQ ID NO: 119448 - DNA, 25 bp, Homo sapien
taggtccggtgtacccttcgggagt

SEQ ID NO: 119449 - DNA, 25 bp, Homo sapien
aggtcctcgagtaggtgcagttaga

SEQ ID NO: 119450 - DNA, 25 bp, Homo sapien
aggtcctcgagttggtgcagttaga

SEQ ID NO: 119451 - DNA, 25 bp, Homo sapien
acactaggctaagtgacagtgacag

SEQ ID NO: 119452 - DNA, 25 bp, Homo sapien
acactaggctaactgacagtgacag

SEQ ID NO: 119453 - DNA, 25 bp, Homo sapien
gtaagtgtacagctcccatgtatag

SEQ ID NO: 119454 - DNA, 25 bp, Homo sapien
gtaagtgtacaggtcccatgtatag

SEQ ID NO: 119455 - DNA, 25 bp, Homo sapien
gtcggtgtctagtatgacgggtatc

SEQ ID NO: 119456 - DNA, 25 bp, Homo sapien
gtcggtgtctagaatgacgggtatc

SEQ ID NO: 119457 - DNA, 25 bp, Homo sapien
aagataaactctgaaggtcgggatc

SEQ ID NO: 119458 - DNA, 25 bp, Homo sapien
aagataaactctcaaggtcgggatc

SEQ ID NO: 119459 - DNA, 25 bp, Homo sapien
tctccgaatcggtgaggtcctttcc

SEQ ID NO: 119460 - DNA, 25 bp, Homo sapien
tctccgaatcggagaggtcctttcc

SEQ ID NO: 119461 - DNA, 25 bp, Homo sapien
gatccatacctcctggggtctttcc

SEQ ID NO: 119462 - DNA, 25 bp, Homo sapien
gatccatacctcgtggggtctttcc

SEQ ID NO: 119463 - DNA, 25 bp, Homo sapien
tggatcgacaaagtagtgccctcac

SEQ ID NO: 119464 - DNA, 25 bp, Homo sapien
tggatcgacaaactagtgccctcac

SEQ ID NO: 119465 - DNA, 25 bp, Homo sapien
cacgaaataaaggaggtgtccataa

SEQ ID NO: 119466 - DNA, 25 bp, Homo sapien
cacgaaataaagcaggtgtccataa

SEQ ID NO: 119467 - DNA, 25 bp, Homo sapien
caaaacttcaagaggagccgtataa

SEQ ID NO: 119468 - DNA, 25 bp, Homo sapien
caaaacttcaagtggagccgtataa

SEQ ID NO: 119469 - DNA, 25 bp, Homo sapien
aaactctacagaatgaaccatctgg

SEQ ID NO: 119470 - DNA, 25 bp, Homo sapien
aaactctacagattgaaccatctgg

SEQ ID NO: 119471 - DNA, 25 bp, Homo sapien
ggactgacttaataacacccatttg

SEQ ID NO: 119472 - DNA, 25 bp, Homo sapien
ggactgacttaaaaacacccatttg

SEQ ID NO: 119473 - DNA, 25 bp, Homo sapien
aaaaaaatccaacctacagataagt

SEQ ID NO: 119474 - DNA, 25 bp, Homo sapien
aaaaaaatccaagctacagataagt

SEQ ID NO: 119475 - DNA, 25 bp, Homo sapien
taatagacggagtacgtcggaatgt

SEQ ID NO: 119476 - DNA, 25 bp, Homo sapien
taatagacggagaacgtcggaatgt

SEQ ID NO: 119477 - DNA, 25 bp, Homo sapien
actacagtaggtggacgtgaagaca

SEQ ID NO: 119478 - DNA, 25 bp, Homo sapien
actacagtaggtcgacgtgaagaca

SEQ ID NO: 119479 - DNA, 25 bp, Homo sapien
gcgggtgcccgtcctgcttggacca

SEQ ID NO: 119480 - DNA, 25 bp, Homo sapien
gcgggtgcccgtgctgcttggacca

SEQ ID NO: 119481 - DNA, 25 bp, Homo sapien
tgggggtcccctcaaagactctgag

SEQ ID NO: 119482 - DNA, 25 bp, Homo sapien
tgggggtcccctgaaagactctgag

SEQ ID NO: 119483 - DNA, 25 bp, Homo sapien
gggggtccactgatcagtaacatac

SEQ ID NO: 119484 - DNA, 25 bp, Homo sapien
gggggtccactgttcagtaacatac

SEQ ID NO: 119485 - DNA, 25 bp, Homo sapien
agaagacgtccctgttggtgtaccc

SEQ ID NO: 119486 - DNA, 25 bp, Homo sapien
agaagacgtcccagttggtgtaccc

SEQ ID NO: 119487 - DNA, 25 bp, Homo sapien
caggaccgtctttatccgaaagaga

SEQ ID NO: 119488 - DNA, 25 bp, Homo sapien
caggaccgtcttaatccgaaagaga

SEQ ID NO: 119489 - DNA, 25 bp, Homo sapien
atagggggttcgaaactcaaagact

SEQ ID NO: 119490 - DNA, 25 bp, Homo sapien
atagggggttcgtaactcaaagact

SEQ ID NO: 119491 - DNA, 25 bp, Homo sapien
aatgcctagagtcacaagttttcac

SEQ ID NO: 119492 - DNA, 25 bp, Homo sapien
aatgcctagagtgacaagttttcac

SEQ ID NO: 119493 - DNA, 25 bp, Homo sapien
gtaaataggttagttacaatttgca

SEQ ID NO: 119494 - DNA, 25 bp, Homo sapien
gtaaataggttacttacaatttgca

SEQ ID NO: 119495 - DNA, 25 bp, Homo sapien
taactaaatcctttcagtgtttgga

SEQ ID NO: 119496 - DNA, 25 bp, Homo sapien
taactaaatcctatcagtgtttgga

SEQ ID NO: 119497 - DNA, 25 bp, Homo sapien
aagagtaccttgtgtagtctttgtc

SEQ ID NO: 119498 - DNA, 25 bp, Homo sapien
aagagtaccttgagtagtctttgtc

SEQ ID NO: 119499 - DNA, 25 bp, Homo sapien
aacgaatatacatggtgtcacattt

SEQ ID NO: 119500 - DNA, 25 bp, Homo sapien
aacgaatatacaaggtgtcacattt

SEQ ID NO: 119501 - DNA, 25 bp, Homo sapien
cggtcaataaaggtcgtacgattta

SEQ ID NO: 119502 - DNA, 25 bp, Homo sapien
cggtcaataaagctcgtacgattta

SEQ ID NO: 119503 - DNA, 25 bp, Homo sapien
gcagtaacatcatgcagactatttt

SEQ ID NO: 119504 - DNA, 25 bp, Homo sapien
gcagtaacatcaagcagactatttt

SEQ ID NO: 119505 - DNA, 25 bp, Homo sapien
tcagactccgattagtcgacctctg

SEQ ID NO: 119506 - DNA, 25 bp, Homo sapien
tcagactccgataagtcgacctctg

SEQ ID NO: 119507 - DNA, 25 bp, Homo sapien
acatactgactcgaacgaaattcga

SEQ ID NO: 119508 - DNA, 25 bp, Homo sapien
acatactgactccaacgaaattcga

SEQ ID NO: 119509 - DNA, 25 bp, Homo sapien
gacaatcagttcattactaagttga

SEQ ID NO: 119510 - DNA, 25 bp, Homo sapien
gacaatcagttctttactaagttga

SEQ ID NO: 119511 - DNA, 25 bp, Homo sapien
gagcacttacagtattttcgtttta

SEQ ID NO: 119512 - DNA, 25 bp, Homo sapien
gagcacttacagaattttcgtttta

SEQ ID NO: 119513 - DNA, 25 bp, Homo sapien
gtagaccgacgagtttacttttagc

SEQ ID NO: 119514 - DNA, 25 bp, Homo sapien
gtagaccgacgactttacttttagc

SEQ ID NO: 119515 - DNA, 25 bp, Homo sapien
gtgagaatgtcacattactttaatc

SEQ ID NO: 119516 - DNA, 25 bp, Homo sapien
gtgagaatgtcagattactttaatc

SEQ ID NO: 119517 - DNA, 25 bp, Homo sapien
ggagcacttacagtattttcgtttt

SEQ ID NO: 119518 - DNA, 25 bp, Homo sapien
ggagcacttacactattttcgtttt

SEQ ID NO: 119519 - DNA, 25 bp, Homo sapien
gttatgaaccaaaatagtcatttcg

SEQ ID NO: 119520 - DNA, 25 bp, Homo sapien
gttatgaaccaatatagtcatttcg

SEQ ID NO: 119521 - DNA, 25 bp, Homo sapien
ttgtcgaatttgtgtgtcaagttgt

SEQ ID NO: 119522 - DNA, 25 bp, Homo sapien
ttgtcgaatttgagtgtcaagttgt

SEQ ID NO: 119523 - DNA, 25 bp, Homo sapien
atagtcggacgaagtacaggtacat

SEQ ID NO: 119524 - DNA, 25 bp, Homo sapien
atagtcggacgatgtacaggtacat

SEQ ID NO: 119525 - DNA, 25 bp, Homo sapien
atcgacggtcggaactcgtagacta

SEQ ID NO: 119526 - DNA, 25 bp, Homo sapien
atcgacggtcggtactcgtagacta

SEQ ID NO: 119527 - DNA, 25 bp, Homo sapien
gaccgacgtagacgtgtccctcgac

SEQ ID NO: 119528 - DNA, 25 bp, Homo sapien
gaccgacgtagaggtgtccctcgac

SEQ ID NO: 119529 - DNA, 25 bp, Homo sapien
gagtcccatcggacccgtctcaggg

SEQ ID NO: 119530 - DNA, 25 bp, Homo sapien
gagtcccatcggtcccgtctcaggg

SEQ ID NO: 119531 - DNA, 25 bp, Homo sapien
gtccaatcttacctctgtccatcgg

SEQ ID NO: 119532 - DNA, 25 bp, Homo sapien
gtccaatcttacgtctgtccatcgg

SEQ ID NO: 119533 - DNA, 25 bp, Homo sapien
gttttatgtcccaaggcacaccgtg

SEQ ID NO: 119534 - DNA, 25 bp, Homo sapien
gttttatgtccctaggcacaccgtg

SEQ ID NO: 119535 - DNA, 25 bp, Homo sapien
gtcctggaccctgtagaatctagag

SEQ ID NO: 119536 - DNA, 25 bp, Homo sapien
gtcctggaccctctagaatctagag

SEQ ID NO: 119537 - DNA, 25 bp, Homo sapien
gttttgacatctttcaacgaataag

SEQ ID NO: 119538 - DNA, 25 bp, Homo sapien
gttttgacatctatcaacgaataag

SEQ ID NO: 119539 - DNA, 25 bp, Homo sapien
gttcttagactttgatgtgccctca

SEQ ID NO: 119540 - DNA, 25 bp, Homo sapien
gttcttagacttagatgtgccctca

SEQ ID NO: 119541 - DNA, 25 bp, Homo sapien
aggtcttccctgaggggtcccggac

SEQ ID NO: 119542 - DNA, 25 bp, Homo sapien
aggtcttccctgtggggtcccggac

SEQ ID NO: 119543 - DNA, 25 bp, Homo sapien
tcgggagtccagtggaggtccctcc

SEQ ID NO: 119544 - DNA, 25 bp, Homo sapien
tcgggagtccagaggaggtccctcc

SEQ ID NO: 119545 - DNA, 25 bp, Homo sapien
atatttgagaaggtaaagtcacttc

SEQ ID NO: 119546 - DNA, 25 bp, Homo sapien
atatttgagaagctaaagtcacttc

SEQ ID NO: 119547 - DNA, 25 bp, Homo sapien
gacttcgtaggacaaacgcccatct

SEQ ID NO: 119548 - DNA, 25 bp, Homo sapien
gacttcgtaggagaaacgcccatct

SEQ ID NO: 119549 - DNA, 25 bp, Homo sapien
gtctcttgaacagacgaccctcaac

SEQ ID NO: 119550 - DNA, 25 bp, Homo sapien
gtctcttgaacacacgaccctcaac

SEQ ID NO: 119551 - DNA, 25 bp, Homo sapien
tcttattgtacagacaccagttgat

SEQ ID NO: 119552 - DNA, 25 bp, Homo sapien
tcttattgtacacacaccagttgat

SEQ ID NO: 119553 - DNA, 25 bp, Homo sapien
cccaaagtggtacaaccggtccgac

SEQ ID NO: 119554 - DNA, 25 bp, Homo sapien
cccaaagtggtagaaccggtccgac

SEQ ID NO: 119555 - DNA, 25 bp, Homo sapien
cgcaggtaggcgaggtccgatcccg

SEQ ID NO: 119556 - DNA, 25 bp, Homo sapien
cgcaggtaggcgtggtccgatcccg

SEQ ID NO: 119557 - DNA, 25 bp, Homo sapien
aggaagaggtgtcggtcccaccgta

SEQ ID NO: 119558 - DNA, 25 bp, Homo sapien
aggaagaggtgtgggtcccaccgta

SEQ ID NO: 119559 - DNA, 25 bp, Homo sapien
gacaacataacgtgtgccgaaccag

SEQ ID NO: 119560 - DNA, 25 bp, Homo sapien
gacaacataacgagtgccgaaccag

SEQ ID NO: 119561 - DNA, 25 bp, Homo sapien
tgaccttctcagacttggagactga

SEQ ID NO: 119562 - DNA, 25 bp, Homo sapien
tgaccttctcagtcttggagactga

SEQ ID NO: 119563 - DNA, 25 bp, Homo sapien
atgttctttgttctgtcattaccga

SEQ ID NO: 119564 - DNA, 25 bp, Homo sapien
atgttctttgttgtgtcattaccga

SEQ ID NO: 119565 - DNA, 25 bp, Homo sapien
cttttctatatgtcattcacgtgtg

SEQ ID NO: 119566 - DNA, 25 bp, Homo sapien
cttttctatatgacattcacgtgtg

SEQ ID NO: 119567 - DNA, 25 bp, Homo sapien
cgtttcctaaccatcttgacctgtg

SEQ ID NO: 119568 - DNA, 25 bp, Homo sapien
cgtttcctaaccttcttgacctgtg

SEQ ID NO: 119569 - DNA, 25 bp, Homo sapien
cggttctcacctctttgagttcgtt

SEQ ID NO: 119570 - DNA, 25 bp, Homo sapien
cggttctcacctgtttgagttcgtt

SEQ ID NO: 119571 - DNA, 25 bp, Homo sapien
taactccctcggtttcggtcactct

SEQ ID NO: 119572 - DNA, 25 bp, Homo sapien
taactccctcggattcggtcactct

SEQ ID NO: 119573 - DNA, 25 bp, Homo sapien
tcatccccggtaaccgttacgagtc

SEQ ID NO: 119574 - DNA, 25 bp, Homo sapien
tcatccccggtatccgttacgagtc

SEQ ID NO: 119575 - DNA, 25 bp, Homo sapien
acgtcttcccacaacacgaggggtc

SEQ ID NO: 119576 - DNA, 25 bp, Homo sapien
acgtcttcccactacacgaggggtc

SEQ ID NO: 119577 - DNA, 25 bp, Homo sapien
cactcagtagcttcccaagtgtttt

SEQ ID NO: 119578 - DNA, 25 bp, Homo sapien
cactcagtagctacccaagtgtttt

SEQ ID NO: 119579 - DNA, 25 bp, Homo sapien
ccagtctcacccagagacgtcttga

SEQ ID NO: 119580 - DNA, 25 bp, Homo sapien
ccagtctcaccctgagacgtcttga

SEQ ID NO: 119581 - DNA, 25 bp, Homo sapien
ctacagtcgtcaaggggtatgttga

SEQ ID NO: 119582 - DNA, 25 bp, Homo sapien
ctacagtcgtcatggggtatgttga

SEQ ID NO: 119583 - DNA, 25 bp, Homo sapien
ctcgaggtccccactactacgtgag

SEQ ID NO: 119584 - DNA, 25 bp, Homo sapien
ctcgaggtcccctctactacgtgag

SEQ ID NO: 119585 - DNA, 25 bp, Homo sapien
aaacgtctccttattacaacgtcgg

SEQ ID NO: 119586 - DNA, 25 bp, Homo sapien
aaacgtctcctttttacaacgtcgg

SEQ ID NO: 119587 - DNA, 25 bp, Homo sapien
gacagtcctccttgtataccctgtg

SEQ ID NO: 119588 - DNA, 25 bp, Homo sapien
gacagtcctcctagtataccctgtg

SEQ ID NO: 119589 - DNA, 25 bp, Homo sapien
acccaccagtcattaagttcctgtg

SEQ ID NO: 119590 - DNA, 25 bp, Homo sapien
acccaccagtcaataagttcctgtg

SEQ ID NO: 119591 - DNA, 25 bp, Homo sapien
actcgggccaaaggtacattttaga

SEQ ID NO: 119592 - DNA, 25 bp, Homo sapien
actcgggccaaacgtacattttaga

SEQ ID NO: 119593 - DNA, 25 bp, Homo sapien
ttgacaagttatcgactctttatag

SEQ ID NO: 119594 - DNA, 25 bp, Homo sapien
ttgacaagttatggactctttatag

SEQ ID NO: 119595 - DNA, 25 bp, Homo sapien
ggacatacgctgtgaccagtatgag

SEQ ID NO: 119596 - DNA, 25 bp, Homo sapien
ggacatacgctgagaccagtatgag

SEQ ID NO: 119597 - DNA, 25 bp, Homo sapien
ccgacaccaaccaagacacagaggg

SEQ ID NO: 119598 - DNA, 25 bp, Homo sapien
ccgacaccaacctagacacagaggg

SEQ ID NO: 119599 - DNA, 25 bp, Homo sapien
accgacccggcgtactcacaagtgg

SEQ ID NO: 119600 - DNA, 25 bp, Homo sapien
accgacccggcgaactcacaagtgg

SEQ ID NO: 119601 - DNA, 25 bp, Homo sapien
gttaaattctttggttcctagattc

SEQ ID NO: 119602 - DNA, 25 bp, Homo sapien
gttaaattctttcgttcctagattc

SEQ ID NO: 119603 - DNA, 25 bp, Homo sapien
aaagtcttttggtcttctatatcgt

SEQ ID NO: 119604 - DNA, 25 bp, Homo sapien
aaagtcttttggacttctatatcgt

SEQ ID NO: 119605 - DNA, 25 bp, Homo sapien
catatttttcgatttctaatgatac

SEQ ID NO: 119606 - DNA, 25 bp, Homo sapien
catatttttcgaattctaatgatac

SEQ ID NO: 119607 - DNA, 25 bp, Homo sapien
cgatttattgtttccttactgaacg

SEQ ID NO: 119608 - DNA, 25 bp, Homo sapien
cgatttattgttaccttactgaacg

SEQ ID NO: 119609 - DNA, 25 bp, Homo sapien
attttaacgagtggtacttctaaac

SEQ ID NO: 119610 - DNA, 25 bp, Homo sapien
attttaacgagtcgtacttctaaac

SEQ ID NO: 119611 - DNA, 25 bp, Homo sapien
actataaaaccttctacttcttgta

SEQ ID NO: 119612 - DNA, 25 bp, Homo sapien
actataaaacctactacttcttgta

SEQ ID NO: 119613 - DNA, 25 bp, Homo sapien
cacaacgaactccttctctttttac

SEQ ID NO: 119614 - DNA, 25 bp, Homo sapien
cacaacgaactcgttctctttttac

SEQ ID NO: 119615 - DNA, 25 bp, Homo sapien
tcacgaacgacctcggcaattgttc

SEQ ID NO: 119616 - DNA, 25 bp, Homo sapien
tcacgaacgaccacggcaattgttc

SEQ ID NO: 119617 - DNA, 25 bp, Homo sapien
tgtaaacctcttgaacagggctgtc

SEQ ID NO: 119618 - DNA, 25 bp, Homo sapien
tgtaaacctcttcaacagggctgtc

SEQ ID NO: 119619 - DNA, 25 bp, Homo sapien
gaagacaggtatcacggaaggtttc

SEQ ID NO: 119620 - DNA, 25 bp, Homo sapien
gaagacaggtatgacggaaggtttc

SEQ ID NO: 119621 - DNA, 25 bp, Homo sapien
gatgagcacgacttaggaaggttcc

SEQ ID NO: 119622 - DNA, 25 bp, Homo sapien
gatgagcacgacataggaaggttcc

SEQ ID NO: 119623 - DNA, 25 bp, Homo sapien
gaagacccgacgacaaagagtctca

SEQ ID NO: 119624 - DNA, 25 bp, Homo sapien
gaagacccgacgtcaaagagtctca

SEQ ID NO: 119625 - DNA, 25 bp, Homo sapien
ggaagagcaagtccttgaggaccag

SEQ ID NO: 119626 - DNA, 25 bp, Homo sapien
ggaagagcaagtgcttgaggaccag

SEQ ID NO: 119627 - DNA, 25 bp, Homo sapien
agcgcgaagaagttttgaggcctag

SEQ ID NO: 119628 - DNA, 25 bp, Homo sapien
agcgcgaagaagatttgaggcctag

SEQ ID NO: 119629 - DNA, 25 bp, Homo sapien
ccacacagggtcaggagacacctag

SEQ ID NO: 119630 - DNA, 25 bp, Homo sapien
ccacacagggtctggagacacctag

SEQ ID NO: 119631 - DNA, 25 bp, Homo sapien
ccgcaagtaggtcgtgtgcctgctg

SEQ ID NO: 119632 - DNA, 25 bp, Homo sapien
ccgcaagtaggtggtgtgcctgctg

SEQ ID NO: 119633 - DNA, 25 bp, Homo sapien
caggactaagacttacgggtccaaa

SEQ ID NO: 119634 - DNA, 25 bp, Homo sapien
caggactaagacatacgggtccaaa

SEQ ID NO: 119635 - DNA, 25 bp, Homo sapien
aacgagaagaaactgaggaccgaac

SEQ ID NO: 119636 - DNA, 25 bp, Homo sapien
aacgagaagaaagtgaggaccgaac

SEQ ID NO: 119637 - DNA, 25 bp, Homo sapien
caagaggacaatgtccaaacagagc

SEQ ID NO: 119638 - DNA, 25 bp, Homo sapien
caagaggacaatctccaaacagagc

SEQ ID NO: 119639 - DNA, 25 bp, Homo sapien
gatgatcgattcctaaagacaagtc

SEQ ID NO: 119640 - DNA, 25 bp, Homo sapien
gatgatcgattcgtaaagacaagtc

SEQ ID NO: 119641 - DNA, 25 bp, Homo sapien
tagaaaggtttcgacacagtttatc

SEQ ID NO: 119642 - DNA, 25 bp, Homo sapien
tagaaaggtttccacacagtttatc

SEQ ID NO: 119643 - DNA, 25 bp, Homo sapien
caaaaggtttcgttatggtttctct

SEQ ID NO: 119644 - DNA, 25 bp, Homo sapien
caaaaggtttcgatatggtttctct

SEQ ID NO: 119645 - DNA, 25 bp, Homo sapien
gacacttccgtttgaaatgtttatc

SEQ ID NO: 119646 - DNA, 25 bp, Homo sapien
gacacttccgttagaaatgtttatc

SEQ ID NO: 119647 - DNA, 25 bp, Homo sapien
aacgttgttatcgtaaaaacctctg

SEQ ID NO: 119648 - DNA, 25 bp, Homo sapien
aacgttgttatcctaaaaacctctg

SEQ ID NO: 119649 - DNA, 25 bp, Homo sapien
aacatgaacggattactttcctatg

SEQ ID NO: 119650 - DNA, 25 bp, Homo sapien
aacatgaacggaatactttcctatg

SEQ ID NO: 119651 - DNA, 25 bp, Homo sapien
actgttagaaccttactctccagtg

SEQ ID NO: 119652 - DNA, 25 bp, Homo sapien
actgttagaaccatactctccagtg

SEQ ID NO: 119653 - DNA, 25 bp, Homo sapien
atactttataagtacggtctccaga

SEQ ID NO: 119654 - DNA, 25 bp, Homo sapien
atactttataagaacggtctccaga

SEQ ID NO: 119655 - DNA, 25 bp, Homo sapien
tcgtgtcgtgtgtactccccgggag

SEQ ID NO: 119656 - DNA, 25 bp, Homo sapien
tcgtgtcgtgtgaactccccgggag

SEQ ID NO: 119657 - DNA, 25 bp, Homo sapien
ttcgttttttcgagtgctccgggtt

SEQ ID NO: 119658 - DNA, 25 bp, Homo sapien
ttcgttttttcgtgtgctccgggtt

SEQ ID NO: 119659 - DNA, 25 bp, Homo sapien
tgttgtctttttctgactgcggcgt

SEQ ID NO: 119660 - DNA, 25 bp, Homo sapien
tgttgtctttttgtgactgcggcgt

SEQ ID NO: 119661 - DNA, 25 bp, Homo sapien
gagtgttcgggctcatcctccggag

SEQ ID NO: 119662 - DNA, 25 bp, Homo sapien
gagtgttcgggcacatcctccggag

SEQ ID NO: 119663 - DNA, 25 bp, Homo sapien
tagggttgtggttgccctccaaagt

SEQ ID NO: 119664 - DNA, 25 bp, Homo sapien
tagggttgtggtagccctccaaagt

SEQ ID NO: 119665 - DNA, 25 bp, Homo sapien
tggcgaaagaactacgtaaacatct

SEQ ID NO: 119666 - DNA, 25 bp, Homo sapien
tggcgaaagaacaacgtaaacatct

SEQ ID NO: 119667 - DNA, 25 bp, Homo sapien
ataacccgtcattagacacacatgg

SEQ ID NO: 119668 - DNA, 25 bp, Homo sapien
ataacccgtcataagacacacatgg

SEQ ID NO: 119669 - DNA, 25 bp, Homo sapien
aatccgtttctaactcagttagtag

SEQ ID NO: 119670 - DNA, 25 bp, Homo sapien
aatccgtttctatctcagttagtag

SEQ ID NO: 119671 - DNA, 25 bp, Homo sapien
tgtatccatgtttgtatcacctggt

SEQ ID NO: 119672 - DNA, 25 bp, Homo sapien
tgtatccatgttagtatcacctggt

SEQ ID NO: 119673 - DNA, 25 bp, Homo sapien
agttttcacttgtagacctaccaag

SEQ ID NO: 119674 - DNA, 25 bp, Homo sapien
agttttcacttgaagacctaccaag

SEQ ID NO: 119675 - DNA, 25 bp, Homo sapien
gtgttcgttttatcgacacccacat

SEQ ID NO: 119676 - DNA, 25 bp, Homo sapien
gtgttcgttttaacgacacccacat

SEQ ID NO: 119677 - DNA, 25 bp, Homo sapien
gtcatagcgtggctcgcgttttaaa

SEQ ID NO: 119678 - DNA, 25 bp, Homo sapien
gtcatagcgtgggtcgcgttttaaa

SEQ ID NO: 119679 - DNA, 25 bp, Homo sapien
tcgacaacgttgtgtgtcttccact

SEQ ID NO: 119680 - DNA, 25 bp, Homo sapien
tcgacaacgttgagtgtcttccact

SEQ ID NO: 119681 - DNA, 25 bp, Homo sapien
aaacgtacgataactgtttgtctag

SEQ ID NO: 119682 - DNA, 25 bp, Homo sapien
aaacgtacgatatctgtttgtctag

SEQ ID NO: 119683 - DNA, 25 bp, Homo sapien
taggagtacggactgtctctacctc

SEQ ID NO: 119684 - DNA, 25 bp, Homo sapien
taggagtacggagtgtctctacctc

SEQ ID NO: 119685 - DNA, 25 bp, Homo sapien
cctgtgtgtgtctccggtggtcctc

SEQ ID NO: 119686 - DNA, 25 bp, Homo sapien
cctgtgtgtgtcaccggtggtcctc

SEQ ID NO: 119687 - DNA, 25 bp, Homo sapien
tccatgtgtaggtatgggtggtcct

SEQ ID NO: 119688 - DNA, 25 bp, Homo sapien
tccatgtgtaggaatgggtggtcct

SEQ ID NO: 119689 - DNA, 25 bp, Homo sapien
tcaatgggtcaatgagtcgacggga

SEQ ID NO: 119690 - DNA, 25 bp, Homo sapien
tcaatgggtcaaagagtcgacggga

SEQ ID NO: 119691 - DNA, 25 bp, Homo sapien
attcgggtccctacgttagagtgag

SEQ ID NO: 119692 - DNA, 25 bp, Homo sapien
attcgggtcccttcgttagagtgag

SEQ ID NO: 119693 - DNA, 25 bp, Homo sapien
atcgattgtcattgtctcacgaacg

SEQ ID NO: 119694 - DNA, 25 bp, Homo sapien
atcgattgtcatagtctcacgaacg

SEQ ID NO: 119695 - DNA, 25 bp, Homo sapien
gtttcgaaattaaacttccgacgat

SEQ ID NO: 119696 - DNA, 25 bp, Homo sapien
gtttcgaaattatacttccgacgat

SEQ ID NO: 119697 - DNA, 25 bp, Homo sapien
tagaacacagtacacactgttaaga

SEQ ID NO: 119698 - DNA, 25 bp, Homo sapien
tagaacacagtagacactgttaaga

SEQ ID NO: 119699 - DNA, 25 bp, Homo sapien
aacgtgacgagagacccgtcacgcc

SEQ ID NO: 119700 - DNA, 25 bp, Homo sapien
aacgtgacgagacacccgtcacgcc

SEQ ID NO: 119701 - DNA, 25 bp, Homo sapien
gaaacggtggaccatcaagacgcat

SEQ ID NO: 119702 - DNA, 25 bp, Homo sapien
gaaacggtggacgatcaagacgcat

SEQ ID NO: 119703 - DNA, 25 bp, Homo sapien
gaagtttagaccaacataactacgg

SEQ ID NO: 119704 - DNA, 25 bp, Homo sapien
gaagtttagacctacataactacgg

SEQ ID NO: 119705 - DNA, 25 bp, Homo sapien
ctagagtttcttcctcgagatcagg

SEQ ID NO: 119706 - DNA, 25 bp, Homo sapien
ctagagtttcttgctcgagatcagg

SEQ ID NO: 119707 - DNA, 25 bp, Homo sapien
gtgaatctactccttgaactccgtg

SEQ ID NO: 119708 - DNA, 25 bp, Homo sapien
gtgaatctactcgttgaactccgtg

SEQ ID NO: 119709 - DNA, 25 bp, Homo sapien
aggtagactcccattcctgtcctgt

SEQ ID NO: 119710 - DNA, 25 bp, Homo sapien
aggtagactccctttcctgtcctgt

SEQ ID NO: 119711 - DNA, 25 bp, Homo sapien
tctactgcccagtcttcttcgtagt

SEQ ID NO: 119712 - DNA, 25 bp, Homo sapien
tctactgcccagacttcttcgtagt

SEQ ID NO: 119713 - DNA, 25 bp, Homo sapien
ttaccccgtaagttcaacactcgag

SEQ ID NO: 119714 - DNA, 25 bp, Homo sapien
ttaccccgtaagatcaacactcgag

SEQ ID NO: 119715 - DNA, 25 bp, Homo sapien
gtaagacccgaaacgtctaataaag

SEQ ID NO: 119716 - DNA, 25 bp, Homo sapien
gtaagacccgaatcgtctaataaag

SEQ ID NO: 119717 - DNA, 25 bp, Homo sapien
cgtaagttcctgtcgttatgttaga

SEQ ID NO: 119718 - DNA, 25 bp, Homo sapien
cgtaagttcctgacgttatgttaga

SEQ ID NO: 119719 - DNA, 25 bp, Homo sapien
ctgattcagagtcgtttgtcagtag

SEQ ID NO: 119720 - DNA, 25 bp, Homo sapien
ctgattcagagtggtttgtcagtag

SEQ ID NO: 119721 - DNA, 25 bp, Homo sapien
gtctgacatctctgttaatactagg

SEQ ID NO: 119722 - DNA, 25 bp, Homo sapien
gtctgacatctcagttaatactagg

SEQ ID NO: 119723 - DNA, 25 bp, Homo sapien
aggcgtggtacctctcgaggaaccg

SEQ ID NO: 119724 - DNA, 25 bp, Homo sapien
aggcgtggtaccactcgaggaaccg

SEQ ID NO: 119725 - DNA, 25 bp, Homo sapien
gtgaagagacgaccataagggaccc

SEQ ID NO: 119726 - DNA, 25 bp, Homo sapien
gtgaagagacgagcataagggaccc

SEQ ID NO: 119727 - DNA, 25 bp, Homo sapien
taaggtgtcctgtaagtgtcaacac

SEQ ID NO: 119728 - DNA, 25 bp, Homo sapien
taaggtgtcctgaaagtgtcaacac

SEQ ID NO: 119729 - DNA, 25 bp, Homo sapien
acgaggtcctcaactactttgtgac

SEQ ID NO: 119730 - DNA, 25 bp, Homo sapien
acgaggtcctcatctactttgtgac

SEQ ID NO: 119731 - DNA, 25 bp, Homo sapien
ttcttgtcacattcacttggacgac

SEQ ID NO: 119732 - DNA, 25 bp, Homo sapien
ttcttgtcacatacacttggacgac

SEQ ID NO: 119733 - DNA, 25 bp, Homo sapien
ccctttttcgactccatgtgtacag

SEQ ID NO: 119734 - DNA, 25 bp, Homo sapien
ccctttttcgacaccatgtgtacag

SEQ ID NO: 119735 - DNA, 25 bp, Homo sapien
cttagtatgtcgacacccgttgttg

SEQ ID NO: 119736 - DNA, 25 bp, Homo sapien
cttagtatgtcgtcacccgttgttg

SEQ ID NO: 119737 - DNA, 25 bp, Homo sapien
taaatatacgtcacccgtcaggtcg

SEQ ID NO: 119738 - DNA, 25 bp, Homo sapien
taaatatacgtctcccgtcaggtcg

SEQ ID NO: 119739 - DNA, 25 bp, Homo sapien
attcgtgcataatgtcacgtagtcg

SEQ ID NO: 119740 - DNA, 25 bp, Homo sapien
attcgtgcataaagtcacgtagtcg

SEQ ID NO: 119741 - DNA, 25 bp, Homo sapien
gtgctgaagtccaaataatcactat

SEQ ID NO: 119742 - DNA, 25 bp, Homo sapien
gtgctgaagtcctaataatcactat

SEQ ID NO: 119743 - DNA, 25 bp, Homo sapien
gtgccggaaggtcaaaaccgttcct

SEQ ID NO: 119744 - DNA, 25 bp, Homo sapien
gtgccggaaggtgaaaaccgttcct

SEQ ID NO: 119745 - DNA, 25 bp, Homo sapien
ggtgtttcaatagatcccttctcct

SEQ ID NO: 119746 - DNA, 25 bp, Homo sapien
ggtgtttcaatacatcccttctcct

SEQ ID NO: 119747 - DNA, 25 bp, Homo sapien
tgggtgtcatttcatttctataaac

SEQ ID NO: 119748 - DNA, 25 bp, Homo sapien
tgggtgtcatttgatttctataaac

SEQ ID NO: 119749 - DNA, 25 bp, Homo sapien
tctcgtctctagaaacgtctttaag

SEQ ID NO: 119750 - DNA, 25 bp, Homo sapien
tctcgtctctagtaacgtctttaag

SEQ ID NO: 119751 - DNA, 25 bp, Homo sapien
tcactgttgcctcttgtccgtggag

SEQ ID NO: 119752 - DNA, 25 bp, Homo sapien
tcactgttgcctgttgtccgtggag

SEQ ID NO: 119753 - DNA, 25 bp, Homo sapien
ttaatgtgtcctcgttggagggacg

SEQ ID NO: 119754 - DNA, 25 bp, Homo sapien
ttaatgtgtcctggttggagggacg

SEQ ID NO: 119755 - DNA, 25 bp, Homo sapien
taacttgtcccttgttcgataggag

SEQ ID NO: 119756 - DNA, 25 bp, Homo sapien
taacttgtccctagttcgataggag

SEQ ID NO: 119757 - DNA, 25 bp, Homo sapien
atattgtccggactgacgtaacaag

SEQ ID NO: 119758 - DNA, 25 bp, Homo sapien
atattgtccggagtgacgtaacaag

SEQ ID NO: 119759 - DNA, 25 bp, Homo sapien
cattacgtccggacctcgtcactaa

SEQ ID NO: 119760 - DNA, 25 bp, Homo sapien
cattacgtccggtcctcgtcactaa

SEQ ID NO: 119761 - DNA, 25 bp, Homo sapien
agtatgtcgggacgactactcctgg

SEQ ID NO: 119762 - DNA, 25 bp, Homo sapien
agtatgtcgggaggactactcctgg

SEQ ID NO: 119763 - DNA, 25 bp, Homo sapien
gtcctaggcgaggtgtaagacccag

SEQ ID NO: 119764 - DNA, 25 bp, Homo sapien
gtcctaggcgagctgtaagacccag

SEQ ID NO: 119765 - DNA, 25 bp, Homo sapien
tgcaccgtgaacctgtagatctccc

SEQ ID NO: 119766 - DNA, 25 bp, Homo sapien
tgcaccgtgaacgtgtagatctccc

SEQ ID NO: 119767 - DNA, 25 bp, Homo sapien
actcatattagagtcaggtactccc

SEQ ID NO: 119768 - DNA, 25 bp, Homo sapien
actcatattagactcaggtactccc

SEQ ID NO: 119769 - DNA, 25 bp, Homo sapien
gtctaagattacgtaagacacccac

SEQ ID NO: 119770 - DNA, 25 bp, Homo sapien
gtctaagattacctaagacacccac

SEQ ID NO: 119771 - DNA, 25 bp, Homo sapien
cccaagagttagaaagtcatcacga

SEQ ID NO: 119772 - DNA, 25 bp, Homo sapien
cccaagagttagtaagtcatcacga

SEQ ID NO: 119773 - DNA, 25 bp, Homo sapien
cctccggagacgtaaatccggatcc

SEQ ID NO: 119774 - DNA, 25 bp, Homo sapien
cctccggagacgaaaatccggatcc

SEQ ID NO: 119775 - DNA, 25 bp, Homo sapien
gtcggcggaccgacatctcagatcc

SEQ ID NO: 119776 - DNA, 25 bp, Homo sapien
gtcggcggaccgtcatctcagatcc

SEQ ID NO: 119777 - DNA, 25 bp, Homo sapien
tcggtaggaactactcttccatcac

SEQ ID NO: 119778 - DNA, 25 bp, Homo sapien
tcggtaggaacttctcttccatcac

SEQ ID NO: 119779 - DNA, 25 bp, Homo sapien
gtcataaaagttcctctcactgaag

SEQ ID NO: 119780 - DNA, 25 bp, Homo sapien
gtcataaaagttgctctcactgaag

SEQ ID NO: 119781 - DNA, 25 bp, Homo sapien
cggaagaaaattgtgacactaacga

SEQ ID NO: 119782 - DNA, 25 bp, Homo sapien
cggaagaaaattctgacactaacga

SEQ ID NO: 119783 - DNA, 25 bp, Homo sapien
agtgagaggaaaaccctttttacta

SEQ ID NO: 119784 - DNA, 25 bp, Homo sapien
agtgagaggaaatccctttttacta

SEQ ID NO: 119785 - DNA, 25 bp, Homo sapien
acgaggtagtagaaaccttttgcga

SEQ ID NO: 119786 - DNA, 25 bp, Homo sapien
acgaggtagtagtaaccttttgcga

SEQ ID NO: 119787 - DNA, 25 bp, Homo sapien
tacatatcgaactaccttcagtgga

SEQ ID NO: 119788 - DNA, 25 bp, Homo sapien
tacatatcgaacaaccttcagtgga

SEQ ID NO: 119789 - DNA, 25 bp, Homo sapien
gttactcagacacttccatcgtgta

SEQ ID NO: 119790 - DNA, 25 bp, Homo sapien
gttactcagacagttccatcgtgta

SEQ ID NO: 119791 - DNA, 25 bp, Homo sapien
gtgtgtctggcagacgccccgtctc

SEQ ID NO: 119792 - DNA, 25 bp, Homo sapien
gtgtgtctggcacacgccccgtctc

SEQ ID NO: 119793 - DNA, 25 bp, Homo sapien
gtgacgtgaccgttccggacccggc

SEQ ID NO: 119794 - DNA, 25 bp, Homo sapien
gtgacgtgaccgatccggacccggc

SEQ ID NO: 119795 - DNA, 25 bp, Homo sapien
tgtgagggtcattggaactcgtgac

SEQ ID NO: 119796 - DNA, 25 bp, Homo sapien
tgtgagggtcataggaactcgtgac

SEQ ID NO: 119797 - DNA, 25 bp, Homo sapien
gtgtactttcctagaagacctcact

SEQ ID NO: 119798 - DNA, 25 bp, Homo sapien
gtgtactttccttgaagacctcact

SEQ ID NO: 119799 - DNA, 25 bp, Homo sapien
cacttggtggaaaaaggacactcgt

SEQ ID NO: 119800 - DNA, 25 bp, Homo sapien
cacttggtggaataaggacactcgt

SEQ ID NO: 119801 - DNA, 25 bp, Homo sapien
agacggagactggaaaaatcaacta

SEQ ID NO: 119802 - DNA, 25 bp, Homo sapien
agacggagactgcaaaaatcaacta

SEQ ID NO: 119803 - DNA, 25 bp, Homo sapien
agacggtaacgactcaaaagcttga

SEQ ID NO: 119804 - DNA, 25 bp, Homo sapien
agacggtaacgagtcaaaagcttga

SEQ ID NO: 119805 - DNA, 25 bp, Homo sapien
caggtaggtattagaccatcttaca

SEQ ID NO: 119806 - DNA, 25 bp, Homo sapien
caggtaggtatttgaccatcttaca

SEQ ID NO: 119807 - DNA, 25 bp, Homo sapien
ccggtcgtcgtaaagacacattgaa

SEQ ID NO: 119808 - DNA, 25 bp, Homo sapien
ccggtcgtcgtatagacacattgaa

SEQ ID NO: 119809 - DNA, 25 bp, Homo sapien
gtcagggttacgactctgtctccaa

SEQ ID NO: 119810 - DNA, 25 bp, Homo sapien
gtcagggttacgtctctgtctccaa

SEQ ID NO: 119811 - DNA, 25 bp, Homo sapien
tggactttaggtttgcacggtacac

SEQ ID NO: 119812 - DNA, 25 bp, Homo sapien
tggactttaggtatgcacggtacac

SEQ ID NO: 119813 - DNA, 25 bp, Homo sapien
gtcggtagttacgattacacgatga

SEQ ID NO: 119814 - DNA, 25 bp, Homo sapien
gtcggtagttaccattacacgatga

SEQ ID NO: 119815 - DNA, 25 bp, Homo sapien
gcttagagagcctattataccctat

SEQ ID NO: 119816 - DNA, 25 bp, Homo sapien
gcttagagagccaattataccctat

SEQ ID NO: 119817 - DNA, 25 bp, Homo sapien
gatttttgggaatggttcgcctact

SEQ ID NO: 119818 - DNA, 25 bp, Homo sapien
gatttttgggaaaggttcgcctact

SEQ ID NO: 119819 - DNA, 25 bp, Homo sapien
tctgacctggaaactgaccgagaac

SEQ ID NO: 119820 - DNA, 25 bp, Homo sapien
tctgacctggaatctgaccgagaac

SEQ ID NO: 119821 - DNA, 25 bp, Homo sapien
cttgtcccactgtggactcgagtga

SEQ ID NO: 119822 - DNA, 25 bp, Homo sapien
cttgtcccactgaggactcgagtga

SEQ ID NO: 119823 - DNA, 25 bp, Homo sapien
tgtcgtccacttgctggacgcgggc

SEQ ID NO: 119824 - DNA, 25 bp, Homo sapien
tgtcgtccacttcctggacgcgggc

SEQ ID NO: 119825 - DNA, 25 bp, Homo sapien
ttcttcgtagttcctctcttcgggg

SEQ ID NO: 119826 - DNA, 25 bp, Homo sapien
ttcttcgtagttgctctcttcgggg

SEQ ID NO: 119827 - DNA, 25 bp, Homo sapien
tgtctaagtgagtcgcgttccaggg

SEQ ID NO: 119828 - DNA, 25 bp, Homo sapien
tgtctaagtgagacgcgttccaggg

SEQ ID NO: 119829 - DNA, 25 bp, Homo sapien
tttttcgtacaatcttcgacgggat

SEQ ID NO: 119830 - DNA, 25 bp, Homo sapien
tttttcgtacaaacttcgacgggat

SEQ ID NO: 119831 - DNA, 25 bp, Homo sapien
gttgacatgtccacgacgacgacag

SEQ ID NO: 119832 - DNA, 25 bp, Homo sapien
gttgacatgtcctcgacgacgacag

SEQ ID NO: 119833 - DNA, 25 bp, Homo sapien
cgtttttacaagtctacggtgaaga

SEQ ID NO: 119834 - DNA, 25 bp, Homo sapien
cgtttttacaagactacggtgaaga

SEQ ID NO: 119835 - DNA, 25 bp, Homo sapien
gtctgttcgaaagacccgtgtggag

SEQ ID NO: 119836 - DNA, 25 bp, Homo sapien
gtctgttcgaaacacccgtgtggag

SEQ ID NO: 119837 - DNA, 25 bp, Homo sapien
acttcgagaagaccagtccaggaag

SEQ ID NO: 119838 - DNA, 25 bp, Homo sapien
acttcgagaagagcagtccaggaag

SEQ ID NO: 119839 - DNA, 25 bp, Homo sapien
acggtcggaagacagcgaagtcgca

SEQ ID NO: 119840 - DNA, 25 bp, Homo sapien
acggtcggaagagagcgaagtcgca

SEQ ID NO: 119841 - DNA, 25 bp, Homo sapien
cacctacggtgaagggtttcttggt

SEQ ID NO: 119842 - DNA, 25 bp, Homo sapien
cacctacggtgatgggtttcttggt

SEQ ID NO: 119843 - DNA, 25 bp, Homo sapien
gtcaaggagacatttctacaaaccg

SEQ ID NO: 119844 - DNA, 25 bp, Homo sapien
gtcaaggagacaattctacaaaccg

SEQ ID NO: 119845 - DNA, 25 bp, Homo sapien
cagtactgaggcttgtcctattaag

SEQ ID NO: 119846 - DNA, 25 bp, Homo sapien
cagtactgaggcatgtcctattaag

SEQ ID NO: 119847 - DNA, 25 bp, Homo sapien
tgtaccacactctcggtaccctagg

SEQ ID NO: 119848 - DNA, 25 bp, Homo sapien
tgtaccacactcacggtaccctagg

SEQ ID NO: 119849 - DNA, 25 bp, Homo sapien
ggagtcgtacccaaaagaccacaag

SEQ ID NO: 119850 - DNA, 25 bp, Homo sapien
ggagtcgtaccctaaagaccacaag

SEQ ID NO: 119851 - DNA, 25 bp, Homo sapien
gggttaccgccaaagtatcacatat

SEQ ID NO: 119852 - DNA, 25 bp, Homo sapien
gggttaccgccatagtatcacatat

SEQ ID NO: 119853 - DNA, 25 bp, Homo sapien
gggtcgtctcctcttctcctaggtt

SEQ ID NO: 119854 - DNA, 25 bp, Homo sapien
gggtcgtctcctgttctcctaggtt

SEQ ID NO: 119855 - DNA, 25 bp, Homo sapien
cgtacgcgctctacttcgggagccg

SEQ ID NO: 119856 - DNA, 25 bp, Homo sapien
cgtacgcgctcttcttcgggagccg

SEQ ID NO: 119857 - DNA, 25 bp, Homo sapien
tcgctgtccttctcggagtaccgct

SEQ ID NO: 119858 - DNA, 25 bp, Homo sapien
tcgctgtccttcacggagtaccgct

SEQ ID NO: 119859 - DNA, 25 bp, Homo sapien
cgccgagccgtgtcagggaccacgt

SEQ ID NO: 119860 - DNA, 25 bp, Homo sapien
cgccgagccgtgacagggaccacgt

SEQ ID NO: 119861 - DNA, 25 bp, Homo sapien
actccagcaccttccgggagacaag

SEQ ID NO: 119862 - DNA, 25 bp, Homo sapien
actccagcacctaccgggagacaag

SEQ ID NO: 119863 - DNA, 25 bp, Homo sapien
ctccgactccggaccgtggagacaa

SEQ ID NO: 119864 - DNA, 25 bp, Homo sapien
ctccgactccggtccgtggagacaa

SEQ ID NO: 119865 - DNA, 25 bp, Homo sapien
ataactattcggtttctgactggga

SEQ ID NO: 119866 - DNA, 25 bp, Homo sapien
ataactattcggattctgactggga

SEQ ID NO: 119867 - DNA, 25 bp, Homo sapien
gttagaccatcgaattccgttcaaa

SEQ ID NO: 119868 - DNA, 25 bp, Homo sapien
gttagaccatcgtattccgttcaaa

SEQ ID NO: 119869 - DNA, 25 bp, Homo sapien
gtgacacttaatctcggtctgcgaa

SEQ ID NO: 119870 - DNA, 25 bp, Homo sapien
gtgacacttaatgtcggtctgcgaa

SEQ ID NO: 119871 - DNA, 25 bp, Homo sapien
agtaatagtgacagagggtcccaca

SEQ ID NO: 119872 - DNA, 25 bp, Homo sapien
agtaatagtgactgagggtcccaca

SEQ ID NO: 119873 - DNA, 25 bp, Homo sapien
aggggacacctgctgtctccgtacc

SEQ ID NO: 119874 - DNA, 25 bp, Homo sapien
aggggacacctggtgtctccgtacc

SEQ ID NO: 119875 - DNA, 25 bp, Homo sapien
catgtgtagacgtccagattgagtc

SEQ ID NO: 119876 - DNA, 25 bp, Homo sapien
catgtgtagacgaccagattgagtc

SEQ ID NO: 119877 - DNA, 25 bp, Homo sapien
gtcttgtgtaccaaacacagtttcc

SEQ ID NO: 119878 - DNA, 25 bp, Homo sapien
gtcttgtgtacctaacacagtttcc

SEQ ID NO: 119879 - DNA, 25 bp, Homo sapien
tcaatggtgttttttcattgtatct

SEQ ID NO: 119880 - DNA, 25 bp, Homo sapien
tcaatggtgtttattcattgtatct

SEQ ID NO: 119881 - DNA, 25 bp, Homo sapien
ttcgtgtttcaattggtactatctc

SEQ ID NO: 119882 - DNA, 25 bp, Homo sapien
ttcgtgtttcaaatggtactatctc

SEQ ID NO: 119883 - DNA, 25 bp, Homo sapien
ttctttatcacgaaccccggtctcg

SEQ ID NO: 119884 - DNA, 25 bp, Homo sapien
ttctttatcacgtaccccggtctcg

SEQ ID NO: 119885 - DNA, 25 bp, Homo sapien
tcgctttggacaccaactctgtcgt

SEQ ID NO: 119886 - DNA, 25 bp, Homo sapien
tcgctttggacagcaactctgtcgt

SEQ ID NO: 119887 - DNA, 25 bp, Homo sapien
tctttgtgtccgttccacgacggct

SEQ ID NO: 119888 - DNA, 25 bp, Homo sapien
tctttgtgtccgatccacgacggct

SEQ ID NO: 119889 - DNA, 25 bp, Homo sapien
ggcctcatctttccatccatgcgag

SEQ ID NO: 119890 - DNA, 25 bp, Homo sapien
ggcctcatctttgcatccatgcgag

SEQ ID NO: 119891 - DNA, 25 bp, Homo sapien
ttgaccctgttaacatacactttgg

SEQ ID NO: 119892 - DNA, 25 bp, Homo sapien
ttgaccctgttatcatacactttgg

SEQ ID NO: 119893 - DNA, 25 bp, Homo sapien
gacaaaccgttttttacaatctgag

SEQ ID NO: 119894 - DNA, 25 bp, Homo sapien
gacaaaccgtttattacaatctgag

SEQ ID NO: 119895 - DNA, 25 bp, Homo sapien
gagaagcgtttgtctcacgtaccaa

SEQ ID NO: 119896 - DNA, 25 bp, Homo sapien
gagaagcgtttgactcacgtaccaa

SEQ ID NO: 119897 - DNA, 25 bp, Homo sapien
aaagggtctccgacggtataccaga

SEQ ID NO: 119898 - DNA, 25 bp, Homo sapien
aaagggtctccgtcggtataccaga

SEQ ID NO: 119899 - DNA, 25 bp, Homo sapien
tgaccgtctagtcctccgaggacca

SEQ ID NO: 119900 - DNA, 25 bp, Homo sapien
tgaccgtctagtgctccgaggacca

SEQ ID NO: 119901 - DNA, 25 bp, Homo sapien
ctacagtactacagggtgcccgtcc

SEQ ID NO: 119902 - DNA, 25 bp, Homo sapien
ctacagtactactgggtgcccgtcc

SEQ ID NO: 119903 - DNA, 25 bp, Homo sapien
gtgactacgacagacggcacgctcc

SEQ ID NO: 119904 - DNA, 25 bp, Homo sapien
gtgactacgacacacggcacgctcc

SEQ ID NO: 119905 - DNA, 25 bp, Homo sapien
cgcggtgacggctcacgcccggcac

SEQ ID NO: 119906 - DNA, 25 bp, Homo sapien
cgcggtgacggcacacgcccggcac

SEQ ID NO: 119907 - DNA, 25 bp, Homo sapien
tggtgtttgtaatggtcctctcgaa

SEQ ID NO: 119908 - DNA, 25 bp, Homo sapien
tggtgtttgtaaaggtcctctcgaa

SEQ ID NO: 119909 - DNA, 25 bp, Homo sapien
cagggggtttatatcgtcctccgga

SEQ ID NO: 119910 - DNA, 25 bp, Homo sapien
cagggggtttatttcgtcctccgga

SEQ ID NO: 119911 - DNA, 25 bp, Homo sapien
agaactagtcctttgacctcgtcaa

SEQ ID NO: 119912 - DNA, 25 bp, Homo sapien
agaactagtcctatgacctcgtcaa

SEQ ID NO: 119913 - DNA, 25 bp, Homo sapien
gttactgcttgagtcctagtcagag

SEQ ID NO: 119914 - DNA, 25 bp, Homo sapien
gttactgcttgactcctagtcagag

SEQ ID NO: 119915 - DNA, 25 bp, Homo sapien
ctgtcctcatttccaacgacgagac

SEQ ID NO: 119916 - DNA, 25 bp, Homo sapien
ctgtcctcatttgcaacgacgagac

SEQ ID NO: 119917 - DNA, 25 bp, Homo sapien
ttatgtgtcggcacaggagccgaga

SEQ ID NO: 119918 - DNA, 25 bp, Homo sapien
ttatgtgtcggctcaggagccgaga

SEQ ID NO: 119919 - DNA, 25 bp, Homo sapien
taagagctaccacagtgacccgagg

SEQ ID NO: 119920 - DNA, 25 bp, Homo sapien
taagagctaccagagtgacccgagg

SEQ ID NO: 119921 - DNA, 25 bp, Homo sapien
gaggtctgtcgtctcgtgtccccgc

SEQ ID NO: 119922 - DNA, 25 bp, Homo sapien
gaggtctgtcgtgtcgtgtccccgc

SEQ ID NO: 119923 - DNA, 25 bp, Homo sapien
acgcctagtgacagtgtaagtcccc

SEQ ID NO: 119924 - DNA, 25 bp, Homo sapien
acgcctagtgactgtgtaagtcccc

SEQ ID NO: 119925 - DNA, 25 bp, Homo sapien
cacatagacccgaagtaccctacgt

SEQ ID NO: 119926 - DNA, 25 bp, Homo sapien
cacatagacccgtagtaccctacgt

SEQ ID NO: 119927 - DNA, 25 bp, Homo sapien
catttgttctcgtcgcgtcacgtcg

SEQ ID NO: 119928 - DNA, 25 bp, Homo sapien
catttgttctcgacgcgtcacgtcg

SEQ ID NO: 119929 - DNA, 25 bp, Homo sapien
gcgacccctgtccaacctcgacgag

SEQ ID NO: 119930 - DNA, 25 bp, Homo sapien
gcgacccctgtcgaacctcgacgag

SEQ ID NO: 119931 - DNA, 25 bp, Homo sapien
cgtcttgcgtgtcaaggtctccgat

SEQ ID NO: 119932 - DNA, 25 bp, Homo sapien
cgtcttgcgtgtgaaggtctccgat

SEQ ID NO: 119933 - DNA, 25 bp, Homo sapien
tttgactagtcgatatatctcagtg

SEQ ID NO: 119934 - DNA, 25 bp, Homo sapien
tttgactagtcgttatatctcagtg

SEQ ID NO: 119935 - DNA, 25 bp, Homo sapien
cgtgtatatgtgttgtactactatc

SEQ ID NO: 119936 - DNA, 25 bp, Homo sapien
cgtgtatatgtgatgtactactatc

SEQ ID NO: 119937 - DNA, 25 bp, Homo sapien
gacctagatgtcgtcgacgtagctc

SEQ ID NO: 119938 - DNA, 25 bp, Homo sapien
gacctagatgtcctcgacgtagctc

SEQ ID NO: 119939 - DNA, 25 bp, Homo sapien
accacagccaggtgaccggtcgcag

SEQ ID NO: 119940 - DNA, 25 bp, Homo sapien
accacagccaggagaccggtcgcag

SEQ ID NO: 119941 - DNA, 25 bp, Homo sapien
gacgcaacggggagatctgttgaat

SEQ ID NO: 119942 - DNA, 25 bp, Homo sapien
gacgcaacggggtgatctgttgaat

SEQ ID NO: 119943 - DNA, 25 bp, Homo sapien
cacttatatgggtcgtttgtagaca

SEQ ID NO: 119944 - DNA, 25 bp, Homo sapien
cacttatatgggacgtttgtagaca

SEQ ID NO: 119945 - DNA, 25 bp, Homo sapien
cccgactctgggagtctcgtcggac

SEQ ID NO: 119946 - DNA, 25 bp, Homo sapien
cccgactctgggtgtctcgtcggac

SEQ ID NO: 119947 - DNA, 25 bp, Homo sapien
ctcactaggggctgactcgtttact

SEQ ID NO: 119948 - DNA, 25 bp, Homo sapien
ctcactaggggcagactcgtttact

SEQ ID NO: 119949 - DNA, 25 bp, Homo sapien
ccaccgtcacagtagtagactttac

SEQ ID NO: 119950 - DNA, 25 bp, Homo sapien
ccaccgtcacagaagtagactttac

SEQ ID NO: 119951 - DNA, 25 bp, Homo sapien
cgaccgactgaaacgaaaatactac

SEQ ID NO: 119952 - DNA, 25 bp, Homo sapien
cgaccgactgaatcgaaaatactac

SEQ ID NO: 119953 - DNA, 25 bp, Homo sapien
cgacggacgtaaactcgggttaaga

SEQ ID NO: 119954 - DNA, 25 bp, Homo sapien
cgacggacgtaatctcgggttaaga

SEQ ID NO: 119955 - DNA, 25 bp, Homo sapien
gaggagacgattatcgcctctccga

SEQ ID NO: 119956 - DNA, 25 bp, Homo sapien
gaggagacgattttcgcctctccga

SEQ ID NO: 119957 - DNA, 25 bp, Homo sapien
ccggagactctttgttccttcccgg

SEQ ID NO: 119958 - DNA, 25 bp, Homo sapien
ccggagactcttagttccttcccgg

SEQ ID NO: 119959 - DNA, 25 bp, Homo sapien
ttgggtttaccatactttacctggt

SEQ ID NO: 119960 - DNA, 25 bp, Homo sapien
ttgggtttaccaaactttacctggt

SEQ ID NO: 119961 - DNA, 25 bp, Homo sapien
tttttgactgaggtctttaatacac

SEQ ID NO: 119962 - DNA, 25 bp, Homo sapien
tttttgactgagctctttaatacac

SEQ ID NO: 119963 - DNA, 25 bp, Homo sapien
cgggtcttgtccatgagttgttaaa

SEQ ID NO: 119964 - DNA, 25 bp, Homo sapien
cgggtcttgtccttgagttgttaaa

SEQ ID NO: 119965 - DNA, 25 bp, Homo sapien
ggccgaggagtttccggcgtttcac

SEQ ID NO: 119966 - DNA, 25 bp, Homo sapien
ggccgaggagttaccggcgtttcac

SEQ ID NO: 119967 - DNA, 25 bp, Homo sapien
tgtggtggatcaaaccgttctttag

SEQ ID NO: 119968 - DNA, 25 bp, Homo sapien
tgtggtggatcataccgttctttag

SEQ ID NO: 119969 - DNA, 25 bp, Homo sapien
tgggggattcctagtctagtcttag

SEQ ID NO: 119970 - DNA, 25 bp, Homo sapien
tgggggattccttgtctagtcttag

SEQ ID NO: 119971 - DNA, 25 bp, Homo sapien
ctatggttttcattcgacttattgg

SEQ ID NO: 119972 - DNA, 25 bp, Homo sapien
ctatggttttcaatcgacttattgg

SEQ ID NO: 119973 - DNA, 25 bp, Homo sapien
caggtccttctcactcatctgggcg

SEQ ID NO: 119974 - DNA, 25 bp, Homo sapien
caggtccttctctctcatctgggcg

SEQ ID NO: 119975 - DNA, 25 bp, Homo sapien
gtcccttcctgtggtagtgaggtct

SEQ ID NO: 119976 - DNA, 25 bp, Homo sapien
gtcccttcctgtcgtagtgaggtct

SEQ ID NO: 119977 - DNA, 25 bp, Homo sapien
tttcaatcccgagactgtaagtatc

SEQ ID NO: 119978 - DNA, 25 bp, Homo sapien
tttcaatcccgacactgtaagtatc

SEQ ID NO: 119979 - DNA, 25 bp, Homo sapien
ctttagtttccgagatttggtgtca

SEQ ID NO: 119980 - DNA, 25 bp, Homo sapien
ctttagtttccgtgatttggtgtca

SEQ ID NO: 119981 - DNA, 25 bp, Homo sapien
gtttaaatctcgagaaaattcacag

SEQ ID NO: 119982 - DNA, 25 bp, Homo sapien
gtttaaatctcgtgaaaattcacag

SEQ ID NO: 119983 - DNA, 25 bp, Homo sapien
tactatcaccttcctaatttcaccg

SEQ ID NO: 119984 - DNA, 25 bp, Homo sapien
tactatcaccttgctaatttcaccg

SEQ ID NO: 119985 - DNA, 25 bp, Homo sapien
ctttaacctgtcgttctttcgctcg

SEQ ID NO: 119986 - DNA, 25 bp, Homo sapien
ctttaacctgtccttctttcgctcg

SEQ ID NO: 119987 - DNA, 25 bp, Homo sapien
gatatttaacagtcctttttgaccg

SEQ ID NO: 119988 - DNA, 25 bp, Homo sapien
gatatttaacagacctttttgaccg

SEQ ID NO: 119989 - DNA, 25 bp, Homo sapien
ggtaaataaactcctctttcttctc

SEQ ID NO: 119990 - DNA, 25 bp, Homo sapien
ggtaaataaactgctctttcttctc

SEQ ID NO: 119991 - DNA, 25 bp, Homo sapien
acaaactaattctgacattgtcgtg

SEQ ID NO: 119992 - DNA, 25 bp, Homo sapien
acaaactaattcagacattgtcgtg

SEQ ID NO: 119993 - DNA, 25 bp, Homo sapien
gcaagaaatgaattgactacctttc

SEQ ID NO: 119994 - DNA, 25 bp, Homo sapien
gcaagaaatgaaatgactacctttc

SEQ ID NO: 119995 - DNA, 25 bp, Homo sapien
aaaagaagttaggtactgtcacctg

SEQ ID NO: 119996 - DNA, 25 bp, Homo sapien
aaaagaagttagctactgtcacctg

SEQ ID NO: 119997 - DNA, 25 bp, Homo sapien
aaaaggggttgatcgatgttcgacc

SEQ ID NO: 119998 - DNA, 25 bp, Homo sapien
aaaaggggttgaacgatgttcgacc

SEQ ID NO: 119999 - DNA, 25 bp, Homo sapien
caagtttgaggacgagtgtcttcgg

SEQ ID NO: 120000 - DNA, 25 bp, Homo sapien
caagtttgaggaggagtgtcttcgg

SEQ ID NO: 120001 - DNA, 25 bp, Homo sapien
aacaagttaagtacccggtgtgtga

SEQ ID NO: 120002 - DNA, 25 bp, Homo sapien
aacaagttaagttcccggtgtgtga

SEQ ID NO: 120003 - DNA, 25 bp, Homo sapien
cgccggccgcttccatactatagtg

SEQ ID NO: 120004 - DNA, 25 bp, Homo sapien
cgccggccgcttgcatactatagtg

SEQ ID NO: 120005 - DNA, 25 bp, Homo sapien
tctccagtcccttaccggtgaggtc

SEQ ID NO: 120006 - DNA, 25 bp, Homo sapien
tctccagtccctaaccggtgaggtc

SEQ ID NO: 120007 - DNA, 25 bp, Homo sapien
ccgtcctagaactcaaccagcggga

SEQ ID NO: 120008 - DNA, 25 bp, Homo sapien
ccgtcctagaacacaaccagcggga

SEQ ID NO: 120009 - DNA, 25 bp, Homo sapien
tcagtaatcggtagacaagacgatt

SEQ ID NO: 120010 - DNA, 25 bp, Homo sapien
tcagtaatcggttgacaagacgatt

SEQ ID NO: 120011 - DNA, 25 bp, Homo sapien
ctgccaaagggcttactaccaggtc

SEQ ID NO: 120012 - DNA, 25 bp, Homo sapien
ctgccaaagggcatactaccaggtc

SEQ ID NO: 120013 - DNA, 25 bp, Homo sapien
ctaatgtttgtctactacgtcattg

SEQ ID NO: 120014 - DNA, 25 bp, Homo sapien
ctaatgtttgtcaactacgtcattg

SEQ ID NO: 120015 - DNA, 25 bp, Homo sapien
cgtaatgttatactgtttcctcgtt

SEQ ID NO: 120016 - DNA, 25 bp, Homo sapien
cgtaatgttatagtgtttcctcgtt

SEQ ID NO: 120017 - DNA, 25 bp, Homo sapien
ctccggatctctcgatctcttcgtt

SEQ ID NO: 120018 - DNA, 25 bp, Homo sapien
ctccggatctctggatctcttcgtt

SEQ ID NO: 120019 - DNA, 25 bp, Homo sapien
aacttgaggactggagtccactagg

SEQ ID NO: 120020 - DNA, 25 bp, Homo sapien
aacttgaggactcgagtccactagg

SEQ ID NO: 120021 - DNA, 25 bp, Homo sapien
tcgtaccagggaggttccatatacg

SEQ ID NO: 120022 - DNA, 25 bp, Homo sapien
tcgtaccagggacgttccatatacg

SEQ ID NO: 120023 - DNA, 25 bp, Homo sapien
cctccaccaccaccgtatccaatac

SEQ ID NO: 120024 - DNA, 25 bp, Homo sapien
cctccaccaccagcgtatccaatac

SEQ ID NO: 120025 - DNA, 25 bp, Homo sapien
ccttcgacccatgtagcagtagata

SEQ ID NO: 120026 - DNA, 25 bp, Homo sapien
ccttcgacccatctagcagtagata

SEQ ID NO: 120027 - DNA, 25 bp, Homo sapien
ctctatccgaacctcctatttaacc

SEQ ID NO: 120028 - DNA, 25 bp, Homo sapien
ctctatccgaacgtcctatttaacc

SEQ ID NO: 120029 - DNA, 25 bp, Homo sapien
tactacttgactgtgtttgtagtca

SEQ ID NO: 120030 - DNA, 25 bp, Homo sapien
tactacttgactctgtttgtagtca

SEQ ID NO: 120031 - DNA, 25 bp, Homo sapien
actgtaatgtttctgtttacgtaca

SEQ ID NO: 120032 - DNA, 25 bp, Homo sapien
actgtaatgtttgtgtttacgtaca

SEQ ID NO: 120033 - DNA, 25 bp, Homo sapien
cggtacgatttcgtactgacatcta

SEQ ID NO: 120034 - DNA, 25 bp, Homo sapien
cggtacgatttcctactgacatcta

SEQ ID NO: 120035 - DNA, 25 bp, Homo sapien
cgttcacacccgactagtcgatgag

SEQ ID NO: 120036 - DNA, 25 bp, Homo sapien
cgttcacacccgtctagtcgatgag

SEQ ID NO: 120037 - DNA, 25 bp, Homo sapien
ccccgggagctctgatctcaggttg

SEQ ID NO: 120038 - DNA, 25 bp, Homo sapien
ccccgggagctcagatctcaggttg

SEQ ID NO: 120039 - DNA, 25 bp, Homo sapien
agtccaataggtgattccacgggtt

SEQ ID NO: 120040 - DNA, 25 bp, Homo sapien
agtccaataggtcattccacgggtt

SEQ ID NO: 120041 - DNA, 25 bp, Homo sapien
gtaaatatcctctttgtcacctggt

SEQ ID NO: 120042 - DNA, 25 bp, Homo sapien
gtaaatatcctcattgtcacctggt

SEQ ID NO: 120043 - DNA, 25 bp, Homo sapien
ggtaaatgaactacttcaagattct

SEQ ID NO: 120044 - DNA, 25 bp, Homo sapien
ggtaaatgaacttcttcaagattct

SEQ ID NO: 120045 - DNA, 25 bp, Homo sapien
acaacgttttgtctatagagtcgtt

SEQ ID NO: 120046 - DNA, 25 bp, Homo sapien
acaacgttttgtgtatagagtcgtt

SEQ ID NO: 120047 - DNA, 25 bp, Homo sapien
cgaatctgtatgtgtagtaacctgt

SEQ ID NO: 120048 - DNA, 25 bp, Homo sapien
cgaatctgtatgagtagtaacctgt

SEQ ID NO: 120049 - DNA, 25 bp, Homo sapien
ctcggaggtttatgttcacaatctt

SEQ ID NO: 120050 - DNA, 25 bp, Homo sapien
ctcggaggtttaagttcacaatctt

SEQ ID NO: 120051 - DNA, 25 bp, Homo sapien
cacaggacggttgtcttttgttgtt

SEQ ID NO: 120052 - DNA, 25 bp, Homo sapien
cacaggacggttctcttttgttgtt

SEQ ID NO: 120053 - DNA, 25 bp, Homo sapien
cgccttacctcttgtacgtctttgt

SEQ ID NO: 120054 - DNA, 25 bp, Homo sapien
cgccttacctctagtacgtctttgt

SEQ ID NO: 120055 - DNA, 25 bp, Homo sapien
acgtctttatattgtgtcttactgg

SEQ ID NO: 120056 - DNA, 25 bp, Homo sapien
acgtctttatatagtgtcttactgg

SEQ ID NO: 120057 - DNA, 25 bp, Homo sapien
gacccgggtttgttgacatgtaaca

SEQ ID NO: 120058 - DNA, 25 bp, Homo sapien
gacccgggtttgatgacatgtaaca

SEQ ID NO: 120059 - DNA, 25 bp, Homo sapien
cttcgagggtctaccagagtcggga

SEQ ID NO: 120060 - DNA, 25 bp, Homo sapien
cttcgagggtcttccagagtcggga

SEQ ID NO: 120061 - DNA, 25 bp, Homo sapien
accaggtcgtcctggggtccgtgat

SEQ ID NO: 120062 - DNA, 25 bp, Homo sapien
accaggtcgtccaggggtccgtgat

SEQ ID NO: 120063 - DNA, 25 bp, Homo sapien
cataccagtttaccatggtttttgt

SEQ ID NO: 120064 - DNA, 25 bp, Homo sapien
cataccagtttagcatggtttttgt

SEQ ID NO: 120065 - DNA, 25 bp, Homo sapien
ttccaatcaggacgttgtcttctgt

SEQ ID NO: 120066 - DNA, 25 bp, Homo sapien
ttccaatcaggaggttgtcttctgt

SEQ ID NO: 120067 - DNA, 25 bp, Homo sapien
ctacaccacctctgtttgaactgcg

SEQ ID NO: 120068 - DNA, 25 bp, Homo sapien
ctacaccacctcagtttgaactgcg

SEQ ID NO: 120069 - DNA, 25 bp, Homo sapien
tggttaatctctttttcctacctgg

SEQ ID NO: 120070 - DNA, 25 bp, Homo sapien
tggttaatctctatttcctacctgg

SEQ ID NO: 120071 - DNA, 25 bp, Homo sapien
ggtaaagcatcttctaccaccgaag

SEQ ID NO: 120072 - DNA, 25 bp, Homo sapien
ggtaaagcatctactaccaccgaag

SEQ ID NO: 120073 - DNA, 25 bp, Homo sapien
ggttgacccctttactcaccgtcta

SEQ ID NO: 120074 - DNA, 25 bp, Homo sapien
ggttgaccccttaactcaccgtcta

SEQ ID NO: 120075 - DNA, 25 bp, Homo sapien
agtagaccctggtgtcgacactaca

SEQ ID NO: 120076 - DNA, 25 bp, Homo sapien
agtagaccctggagtcgacactaca

SEQ ID NO: 120077 - DNA, 25 bp, Homo sapien
gtagtagaccgtggaggtccagctt

SEQ ID NO: 120078 - DNA, 25 bp, Homo sapien
gtagtagaccgtcgaggtccagctt

SEQ ID NO: 120079 - DNA, 25 bp, Homo sapien
cttaccttcgggttcgacgactcgt

SEQ ID NO: 120080 - DNA, 25 bp, Homo sapien
cttaccttcgggatcgacgactcgt

SEQ ID NO: 120081 - DNA, 25 bp, Homo sapien
accgtctcaggttcccagtctgggt

SEQ ID NO: 120082 - DNA, 25 bp, Homo sapien
accgtctcaggtacccagtctgggt

SEQ ID NO: 120083 - DNA, 25 bp, Homo sapien
gtgtcctgtactacggtcgggttga

SEQ ID NO: 120084 - DNA, 25 bp, Homo sapien
gtgtcctgtacttcggtcgggttga

SEQ ID NO: 120085 - DNA, 25 bp, Homo sapien
gctcaggactaagtgtaggttcgag

SEQ ID NO: 120086 - DNA, 25 bp, Homo sapien
gctcaggactaactgtaggttcgag

SEQ ID NO: 120087 - DNA, 25 bp, Homo sapien
gtaagtactcacgtcccatgtatat

SEQ ID NO: 120088 - DNA, 25 bp, Homo sapien
gtaagtactcacctcccatgtatat

SEQ ID NO: 120089 - DNA, 25 bp, Homo sapien
caggagtctagttactgaagtgttc

SEQ ID NO: 120090 - DNA, 25 bp, Homo sapien
caggagtctagtaactgaagtgttc

SEQ ID NO: 120091 - DNA, 25 bp, Homo sapien
agactaaatctgaatgtctgtaaca

SEQ ID NO: 120092 - DNA, 25 bp, Homo sapien
agactaaatctgtatgtctgtaaca

SEQ ID NO: 120093 - DNA, 25 bp, Homo sapien
gtcccacatggataggtctcttcca

SEQ ID NO: 120094 - DNA, 25 bp, Homo sapien
gtcccacatggaaaggtctcttcca

SEQ ID NO: 120095 - DNA, 25 bp, Homo sapien
gggctactctttcaggggtctttcc

SEQ ID NO: 120096 - DNA, 25 bp, Homo sapien
gggctactctttgaggggtctttcc

SEQ ID NO: 120097 - DNA, 25 bp, Homo sapien
ttcggctccaaagaggactcgctcc

SEQ ID NO: 120098 - DNA, 25 bp, Homo sapien
ttcggctccaaacaggactcgctcc

SEQ ID NO: 120099 - DNA, 25 bp, Homo sapien
ctacgagaaaaagacaggcatcaca

SEQ ID NO: 120100 - DNA, 25 bp, Homo sapien
ctacgagaaaaacacaggcatcaca

SEQ ID NO: 120101 - DNA, 25 bp, Homo sapien
cccaacttaaagacgggacccacag

SEQ ID NO: 120102 - DNA, 25 bp, Homo sapien
cccaacttaaagtcgggacccacag

SEQ ID NO: 120103 - DNA, 25 bp, Homo sapien
aacacttagacatacggaacccagg

SEQ ID NO: 120104 - DNA, 25 bp, Homo sapien
aacacttagacaaacggaacccagg

SEQ ID NO: 120105 - DNA, 25 bp, Homo sapien
actgttatacgaaaccggccatttg

SEQ ID NO: 120106 - DNA, 25 bp, Homo sapien
actgttatacgataccggccatttg

SEQ ID NO: 120107 - DNA, 25 bp, Homo sapien
aaccgaaaatcagatctacgaattg

SEQ ID NO: 120108 - DNA, 25 bp, Homo sapien
aaccgaaaatcacatctacgaattg

SEQ ID NO: 120109 - DNA, 25 bp, Homo sapien
atcataagtatcaggaaccaaatgt

SEQ ID NO: 120110 - DNA, 25 bp, Homo sapien
atcataagtatctggaaccaaatgt

SEQ ID NO: 120111 - DNA, 25 bp, Homo sapien
gacactagtctgtaacgagacaaca

SEQ ID NO: 120112 - DNA, 25 bp, Homo sapien
gacactagtctgaaacgagacaaca

SEQ ID NO: 120113 - DNA, 25 bp, Homo sapien
cgggggtcccgtcggcggggaccga

SEQ ID NO: 120114 - DNA, 25 bp, Homo sapien
cgggggtcccgtgggcggggaccga

SEQ ID NO: 120115 - DNA, 25 bp, Homo sapien
tgttaggaaagttttttagttcaga

SEQ ID NO: 120116 - DNA, 25 bp, Homo sapien
tgttaggaaagtattttagttcaga

SEQ ID NO: 120117 - DNA, 25 bp, Homo sapien
gaggggtctctacgaaataatgtac

SEQ ID NO: 120118 - DNA, 25 bp, Homo sapien
gaggggtctctaggaaataatgtac

SEQ ID NO: 120119 - DNA, 25 bp, Homo sapien
ataagacgtccatgtacaggtcccc

SEQ ID NO: 120120 - DNA, 25 bp, Homo sapien
ataagacgtccaagtacaggtcccc

SEQ ID NO: 120121 - DNA, 25 bp, Homo sapien
acgtaaccgtcatatcaattacgga

SEQ ID NO: 120122 - DNA, 25 bp, Homo sapien
acgtaaccgtcaaatcaattacgga

SEQ ID NO: 120123 - DNA, 25 bp, Homo sapien
acggtggtcccgaagagtcaagaga

SEQ ID NO: 120124 - DNA, 25 bp, Homo sapien
acggtggtcccgtagagtcaagaga

SEQ ID NO: 120125 - DNA, 25 bp, Homo sapien
tatagtcttggttctaagtttgtcc

SEQ ID NO: 120126 - DNA, 25 bp, Homo sapien
tatagtcttggtactaagtttgtcc

SEQ ID NO: 120127 - DNA, 25 bp, Homo sapien
atatgacttccgtacaatatggtca

SEQ ID NO: 120128 - DNA, 25 bp, Homo sapien
atatgacttccgaacaatatggtca

SEQ ID NO: 120129 - DNA, 25 bp, Homo sapien
acgtaagagccctcactgtatggaa

SEQ ID NO: 120130 - DNA, 25 bp, Homo sapien
acgtaagagcccacactgtatggaa

SEQ ID NO: 120131 - DNA, 25 bp, Homo sapien
taagagtcccccatgtctcgtttat

SEQ ID NO: 120132 - DNA, 25 bp, Homo sapien
taagagtcccccttgtctcgtttat

SEQ ID NO: 120133 - DNA, 25 bp, Homo sapien
acgtgcacgtcatcggtttctattt

SEQ ID NO: 120134 - DNA, 25 bp, Homo sapien
acgtgcacgtcaacggtttctattt

SEQ ID NO: 120135 - DNA, 25 bp, Homo sapien
gtagacatttaggtcgtcatttacg

SEQ ID NO: 120136 - DNA, 25 bp, Homo sapien
gtagacatttagctcgtcatttacg

SEQ ID NO: 120137 - DNA, 25 bp, Homo sapien
gtctacagttactgcgtcgcatttt

SEQ ID NO: 120138 - DNA, 25 bp, Homo sapien
gtctacagttacagcgtcgcatttt

SEQ ID NO: 120139 - DNA, 25 bp, Homo sapien
gtcagcgttcatctacgacctgagt

SEQ ID NO: 120140 - DNA, 25 bp, Homo sapien
gtcagcgttcatgtacgacctgagt

SEQ ID NO: 120141 - DNA, 25 bp, Homo sapien
agatctcacccagatacgtattgag

SEQ ID NO: 120142 - DNA, 25 bp, Homo sapien
agatctcacccacatacgtattgag

SEQ ID NO: 120143 - DNA, 25 bp, Homo sapien
ccaaatgaggtcagtatcaagttga

SEQ ID NO: 120144 - DNA, 25 bp, Homo sapien
ccaaatgaggtctgtatcaagttga

SEQ ID NO: 120145 - DNA, 25 bp, Homo sapien
cgcgtaaaacagtatttctgcttaa

SEQ ID NO: 120146 - DNA, 25 bp, Homo sapien
cgcgtaaaacagaatttctgcttaa

SEQ ID NO: 120147 - DNA, 25 bp, Homo sapien
gtcgaccacaagtttataccttaga

SEQ ID NO: 120148 - DNA, 25 bp, Homo sapien
gtcgaccacaagattataccttaga

SEQ ID NO: 120149 - DNA, 25 bp, Homo sapien
ggtgtaagtgcactattttcaagtc

SEQ ID NO: 120150 - DNA, 25 bp, Homo sapien
ggtgtaagtgcagtattttcaagtc

SEQ ID NO: 120151 - DNA, 25 bp, Homo sapien
gtgagacatgaatatctttcttgtc

SEQ ID NO: 120152 - DNA, 25 bp, Homo sapien
gtgagacatgaaaatctttcttgtc

SEQ ID NO: 120153 - DNA, 25 bp, Homo sapien
gtctatttccaaacctgaattgtcg

SEQ ID NO: 120154 - DNA, 25 bp, Homo sapien
gtctatttccaatcctgaattgtcg

SEQ ID NO: 120155 - DNA, 25 bp, Homo sapien
gtttcaaccatgtcttaacgattgt

SEQ ID NO: 120156 - DNA, 25 bp, Homo sapien
gtttcaaccatgacttaacgattgt

SEQ ID NO: 120157 - DNA, 25 bp, Homo sapien
acgtgcggacacataccggtacgta

SEQ ID NO: 120158 - DNA, 25 bp, Homo sapien
acgtgcggacacttaccggtacgta

SEQ ID NO: 120159 - DNA, 25 bp, Homo sapien
tagagaggtaccatactctgacgag

SEQ ID NO: 120160 - DNA, 25 bp, Homo sapien
tagagaggtaccttactctgacgag

SEQ ID NO: 120161 - DNA, 25 bp, Homo sapien
ataacagtagtccgttccttcgtac

SEQ ID NO: 120162 - DNA, 25 bp, Homo sapien
ataacagtagtcggttccttcgtac

SEQ ID NO: 120163 - DNA, 25 bp, Homo sapien
ggtcaccaacggcgcgcccatgtag

SEQ ID NO: 120164 - DNA, 25 bp, Homo sapien
ggtcaccaacggggcgcccatgtag

SEQ ID NO: 120165 - DNA, 25 bp, Homo sapien
cacacatactagtccttccagtcgg

SEQ ID NO: 120166 - DNA, 25 bp, Homo sapien
cacacatactagaccttccagtcgg

SEQ ID NO: 120167 - DNA, 25 bp, Homo sapien
gtttcatccacctcggctacatcgg

SEQ ID NO: 120168 - DNA, 25 bp, Homo sapien
gtttcatccaccacggctacatcgg

SEQ ID NO: 120169 - DNA, 25 bp, Homo sapien
tccttcgcccactgtagcatctgag

SEQ ID NO: 120170 - DNA, 25 bp, Homo sapien
tccttcgcccacagtagcatctgag

SEQ ID NO: 120171 - DNA, 25 bp, Homo sapien
cgtttgtcagccaagaacgattaag

SEQ ID NO: 120172 - DNA, 25 bp, Homo sapien
cgtttgtcagcctagaacgattaag

SEQ ID NO: 120173 - DNA, 25 bp, Homo sapien
gacttgactttattagtgcccacta

SEQ ID NO: 120174 - DNA, 25 bp, Homo sapien
gacttgactttaatagtgcccacta

SEQ ID NO: 120175 - DNA, 25 bp, Homo sapien
ggatttcctttgcttgtcgccggag

SEQ ID NO: 120176 - DNA, 25 bp, Homo sapien
ggatttcctttggttgtcgccggag

SEQ ID NO: 120177 - DNA, 25 bp, Homo sapien
gtagggtccaactgggtgccatcgg

SEQ ID NO: 120178 - DNA, 25 bp, Homo sapien
gtagggtccaacagggtgccatcgg

SEQ ID NO: 120179 - DNA, 25 bp, Homo sapien
tattttgaaaactatgtcagtctcg

SEQ ID NO: 120180 - DNA, 25 bp, Homo sapien
tattttgaaaacaatgtcagtctcg

SEQ ID NO: 120181 - DNA, 25 bp, Homo sapien
ttcttgtaggaccagaagccacttc

SEQ ID NO: 120182 - DNA, 25 bp, Homo sapien
ttcttgtaggacgagaagccacttc

SEQ ID NO: 120183 - DNA, 25 bp, Homo sapien
tctctgtagaacgtgacaaactcca

SEQ ID NO: 120184 - DNA, 25 bp, Homo sapien
tctctgtagaacctgacaaactcca

SEQ ID NO: 120185 - DNA, 25 bp, Homo sapien
ttcttattgtacagacaccagttga

SEQ ID NO: 120186 - DNA, 25 bp, Homo sapien
ttcttattgtactgacaccagttga

SEQ ID NO: 120187 - DNA, 25 bp, Homo sapien
ccctttgtcggtggacccggtccgg

SEQ ID NO: 120188 - DNA, 25 bp, Homo sapien
ccctttgtcggtcgacccggtccgg

SEQ ID NO: 120189 - DNA, 25 bp, Homo sapien
ccacggggagttcgtccgttacccg

SEQ ID NO: 120190 - DNA, 25 bp, Homo sapien
ccacggggagttggtccgttacccg

SEQ ID NO: 120191 - DNA, 25 bp, Homo sapien
tgctaaaccggttcggtcccccgta

SEQ ID NO: 120192 - DNA, 25 bp, Homo sapien
tgctaaaccggtacggtcccccgta

SEQ ID NO: 120193 - DNA, 25 bp, Homo sapien
ctacaacatcagtctgtcccacgca

SEQ ID NO: 120194 - DNA, 25 bp, Homo sapien
ctacaacatcagactgtcccacgca

SEQ ID NO: 120195 - DNA, 25 bp, Homo sapien
gaactgttctcactcttgggactga

SEQ ID NO: 120196 - DNA, 25 bp, Homo sapien
gaactgttctcagtcttgggactga

SEQ ID NO: 120197 - DNA, 25 bp, Homo sapien
gtctgtattttgagtttcaaaccga

SEQ ID NO: 120198 - DNA, 25 bp, Homo sapien
gtctgtattttgtgtttcaaaccga

SEQ ID NO: 120199 - DNA, 25 bp, Homo sapien
agtgtttcttatgtccttcacggtt

SEQ ID NO: 120200 - DNA, 25 bp, Homo sapien
agtgtttcttatctccttcacggtt

SEQ ID NO: 120201 - DNA, 25 bp, Homo sapien
agtttccttcactccggacctagtg

SEQ ID NO: 120202 - DNA, 25 bp, Homo sapien
agtttccttcacaccggacctagtg

SEQ ID NO: 120203 - DNA, 25 bp, Homo sapien
ggactctcaccctttcgtaattgtt

SEQ ID NO: 120204 - DNA, 25 bp, Homo sapien
ggactctcacccattcgtaattgtt

SEQ ID NO: 120205 - DNA, 25 bp, Homo sapien
tatacgccttgatttacgtgtttct

SEQ ID NO: 120206 - DNA, 25 bp, Homo sapien
tatacgccttgaattacgtgtttct

SEQ ID NO: 120207 - DNA, 25 bp, Homo sapien
caaccgtgtcgcatccgtgacggtc

SEQ ID NO: 120208 - DNA, 25 bp, Homo sapien
caaccgtgtcgcttccgtgacggtc

SEQ ID NO: 120209 - DNA, 25 bp, Homo sapien
acgcactccgtcgagacctaggggc

SEQ ID NO: 120210 - DNA, 25 bp, Homo sapien
acgcactccgtccagacctaggggc

SEQ ID NO: 120211 - DNA, 25 bp, Homo sapien
aatcatatcgtagagcaaggtttcg

SEQ ID NO: 120212 - DNA, 25 bp, Homo sapien
aatcatatcgtacagcaaggtttcg

SEQ ID NO: 120213 - DNA, 25 bp, Homo sapien
acacttcatccgaagacgtcagtta

SEQ ID NO: 120214 - DNA, 25 bp, Homo sapien
acacttcatccgtagacgtcagtta

SEQ ID NO: 120215 - DNA, 25 bp, Homo sapien
gacactatgtcaagggatcttgtaa

SEQ ID NO: 120216 - DNA, 25 bp, Homo sapien
gacactatgtcatgggatcttgtaa

SEQ ID NO: 120217 - DNA, 25 bp, Homo sapien
ccacgcgacccgagtcttacgtagg

SEQ ID NO: 120218 - DNA, 25 bp, Homo sapien
ccacgcgacccgtgtcttacgtagg

SEQ ID NO: 120219 - DNA, 25 bp, Homo sapien
aaccgtcctcttgtacgtatactga

SEQ ID NO: 120220 - DNA, 25 bp, Homo sapien
aaccgtcctcttctacgtatactga

SEQ ID NO: 120221 - DNA, 25 bp, Homo sapien
gaaacgtgttcttgaactcctgtag

SEQ ID NO: 120222 - DNA, 25 bp, Homo sapien
gaaacgtgttctagaactcctgtag

SEQ ID NO: 120223 - DNA, 25 bp, Homo sapien
tcaactgtacttcaacgttccagtg

SEQ ID NO: 120224 - DNA, 25 bp, Homo sapien
tcaactgtacttgaacgttccagtg

SEQ ID NO: 120225 - DNA, 25 bp, Homo sapien
cggtgcccgaactgcattattagtg

SEQ ID NO: 120226 - DNA, 25 bp, Homo sapien
cggtgcccgaacagcattattagtg

SEQ ID NO: 120227 - DNA, 25 bp, Homo sapien
ttccttgacaagtgggacttttgtg

SEQ ID NO: 120228 - DNA, 25 bp, Homo sapien
ttccttgacaagagggacttttgtg

SEQ ID NO: 120229 - DNA, 25 bp, Homo sapien
gacatagctagcaagacatagtcag

SEQ ID NO: 120230 - DNA, 25 bp, Homo sapien
gacatagctagctagacatagtcag

SEQ ID NO: 120231 - DNA, 25 bp, Homo sapien
ctccaaccaccctatacgaaagagg

SEQ ID NO: 120232 - DNA, 25 bp, Homo sapien
ctccaaccacccaatacgaaagagg

SEQ ID NO: 120233 - DNA, 25 bp, Homo sapien
cggctcgaccggtaccacaagtgcg

SEQ ID NO: 120234 - DNA, 25 bp, Homo sapien
cggctcgaccggaaccacaagtgcg

SEQ ID NO: 120235 - DNA, 25 bp, Homo sapien
ggaaattcgttggatcccatatgtc

SEQ ID NO: 120236 - DNA, 25 bp, Homo sapien
ggaaattcgttgcatcccatatgtc

SEQ ID NO: 120237 - DNA, 25 bp, Homo sapien
gagtatcgtcttaggcccttattcg

SEQ ID NO: 120238 - DNA, 25 bp, Homo sapien
gagtatcgtctttggcccttattcg

SEQ ID NO: 120239 - DNA, 25 bp, Homo sapien
agacttctttgaggtcttaatgctc

SEQ ID NO: 120240 - DNA, 25 bp, Homo sapien
agacttctttgacgtcttaatgctc

SEQ ID NO: 120241 - DNA, 25 bp, Homo sapien
cgggtcattttatccttacttacag

SEQ ID NO: 120242 - DNA, 25 bp, Homo sapien
cgggtcattttaaccttacttacag

SEQ ID NO: 120243 - DNA, 25 bp, Homo sapien
tcgtctaaagtggtactctctaatg

SEQ ID NO: 120244 - DNA, 25 bp, Homo sapien
tcgtctaaagtgctactctctaatg

SEQ ID NO: 120245 - DNA, 25 bp, Homo sapien
tatcgtaaactgtctactctttcga

SEQ ID NO: 120246 - DNA, 25 bp, Homo sapien
tatcgtaaactgactactctttcga

SEQ ID NO: 120247 - DNA, 25 bp, Homo sapien
ccacgaaacgttactctttatcgta

SEQ ID NO: 120248 - DNA, 25 bp, Homo sapien
ccacgaaacgtttctctttatcgta

SEQ ID NO: 120249 - DNA, 25 bp, Homo sapien
caatacgtacactcgccaattggtc

SEQ ID NO: 120250 - DNA, 25 bp, Homo sapien
caatacgtacacacgccaattggtc

SEQ ID NO: 120251 - DNA, 25 bp, Homo sapien
cagacacccctgtcagtggcgagtc

SEQ ID NO: 120252 - DNA, 25 bp, Homo sapien
cagacacccctgacagtggcgagtc

SEQ ID NO: 120253 - DNA, 25 bp, Homo sapien
agaaaaagcgtttcggaaggtcttc

SEQ ID NO: 120254 - DNA, 25 bp, Homo sapien
agaaaaagcgttacggaaggtcttc

SEQ ID NO: 120255 - DNA, 25 bp, Homo sapien
aagaagaatgacttggaaagtcccg

SEQ ID NO: 120256 - DNA, 25 bp, Homo sapien
aagaagaatgacatggaaagtcccg

SEQ ID NO: 120257 - DNA, 25 bp, Homo sapien
gaaagaccggacaccgaaagacccg

SEQ ID NO: 120258 - DNA, 25 bp, Homo sapien
gaaagaccggactccgaaagacccg

SEQ ID NO: 120259 - DNA, 25 bp, Homo sapien
ggtcagaacagaacctgggagacca

SEQ ID NO: 120260 - DNA, 25 bp, Homo sapien
ggtcagaacagatcctgggagacca

SEQ ID NO: 120261 - DNA, 25 bp, Homo sapien
agggaagaacgtattggaccgtcga

SEQ ID NO: 120262 - DNA, 25 bp, Homo sapien
agggaagaacgttttggaccgtcga

SEQ ID NO: 120263 - DNA, 25 bp, Homo sapien
taccggaacaggtctagggcccact

SEQ ID NO: 120264 - DNA, 25 bp, Homo sapien
taccggaacaggactagggcccact

SEQ ID NO: 120265 - DNA, 25 bp, Homo sapien
ccgtcacaagggatgtgcggtgacc

SEQ ID NO: 120266 - DNA, 25 bp, Homo sapien
ccgtcacaagggttgtgcggtgacc

SEQ ID NO: 120267 - DNA, 25 bp, Homo sapien
ctacgggtaaactatggtcgccaac

SEQ ID NO: 120268 - DNA, 25 bp, Homo sapien
ctacgggtaaacaatggtcgccaac

SEQ ID NO: 120269 - DNA, 25 bp, Homo sapien
cgtacggaaacacactgggccagtc

SEQ ID NO: 120270 - DNA, 25 bp, Homo sapien
cgtacggaaacagactgggccagtc

SEQ ID NO: 120271 - DNA, 25 bp, Homo sapien
aggggaatacttgaccaaaccagtt

SEQ ID NO: 120272 - DNA, 25 bp, Homo sapien
aggggaatacttcaccaaaccagtt

SEQ ID NO: 120273 - DNA, 25 bp, Homo sapien
cgtaagatacataccgaaagaaatt

SEQ ID NO: 120274 - DNA, 25 bp, Homo sapien
cgtaagatacattccgaaagaaatt

SEQ ID NO: 120275 - DNA, 25 bp, Homo sapien
tgaaaattctaggacacagaattac

SEQ ID NO: 120276 - DNA, 25 bp, Homo sapien
tgaaaattctagcacacagaattac

SEQ ID NO: 120277 - DNA, 25 bp, Homo sapien
acaaagatttactctgtgttttact

SEQ ID NO: 120278 - DNA, 25 bp, Homo sapien
acaaagatttacactgtgttttact

SEQ ID NO: 120279 - DNA, 25 bp, Homo sapien
tgacttcgcgtttgaatgttttaac

SEQ ID NO: 120280 - DNA, 25 bp, Homo sapien
tgacttcgcgttagaatgttttaac

SEQ ID NO: 120281 - DNA, 25 bp, Homo sapien
attgtttcggtacagatacgactta

SEQ ID NO: 120282 - DNA, 25 bp, Homo sapien
attgtttcggtagagatacgactta

SEQ ID NO: 120283 - DNA, 25 bp, Homo sapien
aactgtgaaccgtaataattctatg

SEQ ID NO: 120284 - DNA, 25 bp, Homo sapien
aactgtgaaccgaaataattctatg

SEQ ID NO: 120285 - DNA, 25 bp, Homo sapien
tactttggacactacttacactgtg

SEQ ID NO: 120286 - DNA, 25 bp, Homo sapien
tactttggacacaacttacactgtg

SEQ ID NO: 120287 - DNA, 25 bp, Homo sapien
atcttgataaaacttacgactagag

SEQ ID NO: 120288 - DNA, 25 bp, Homo sapien
atcttgataaaagttacgactagag

SEQ ID NO: 120289 - DNA, 25 bp, Homo sapien
ttatgtagttaaaccgtcgacgggg

SEQ ID NO: 120290 - DNA, 25 bp, Homo sapien
ttatgtagttaatccgtcgacgggg

SEQ ID NO: 120291 - DNA, 25 bp, Homo sapien
tatattttgtaactgtcccggagtt

SEQ ID NO: 120292 - DNA, 25 bp, Homo sapien
tatattttgtaagtgtcccggagtt

SEQ ID NO: 120293 - DNA, 25 bp, Homo sapien
gtttcttctgttcgtcgcggtggtt

SEQ ID NO: 120294 - DNA, 25 bp, Homo sapien
gtttcttctgttggtcgcggtggtt

SEQ ID NO: 120295 - DNA, 25 bp, Homo sapien
gagtttcaagagtcatcgcagtgga

SEQ ID NO: 120296 - DNA, 25 bp, Homo sapien
gagtttcaagagacatcgcagtgga

SEQ ID NO: 120297 - DNA, 25 bp, Homo sapien
agggttctcggtgaacccgtcccca

SEQ ID NO: 120298 - DNA, 25 bp, Homo sapien
agggttctcggtcaacccgtcccca

SEQ ID NO: 120299 - DNA, 25 bp, Homo sapien
gacgaacataactactaatacttac

SEQ ID NO: 120300 - DNA, 25 bp, Homo sapien
gacgaacataacaactaatacttac

SEQ ID NO: 120301 - DNA, 25 bp, Homo sapien
ttacacccgtcctagtcacatatgg

SEQ ID NO: 120302 - DNA, 25 bp, Homo sapien
ttacacccgtccaagtcacatatgg

SEQ ID NO: 120303 - DNA, 25 bp, Homo sapien
taaatccgttcctttccgtgtagta

SEQ ID NO: 120304 - DNA, 25 bp, Homo sapien
taaatccgttccattccgtgtagta

SEQ ID NO: 120305 - DNA, 25 bp, Homo sapien
gtacccagttcttcttcccgtcggt

SEQ ID NO: 120306 - DNA, 25 bp, Homo sapien
gtacccagttctacttcccgtcggt

SEQ ID NO: 120307 - DNA, 25 bp, Homo sapien
ggtttcacgttctacgtcccaagag

SEQ ID NO: 120308 - DNA, 25 bp, Homo sapien
ggtttcacgttcaacgtcccaagag

SEQ ID NO: 120309 - DNA, 25 bp, Homo sapien
ggttctcggtttctcgaccacgata

SEQ ID NO: 120310 - DNA, 25 bp, Homo sapien
ggttctcggtttgtcgaccacgata

SEQ ID NO: 120311 - DNA, 25 bp, Homo sapien
aagtagtagtcatagcgtggctcgc

SEQ ID NO: 120312 - DNA, 25 bp, Homo sapien
aagtagtagtcaaagcgtggctcgc

SEQ ID NO: 120313 - DNA, 25 bp, Homo sapien
tttgacaacgggtgtcttcgaccat

SEQ ID NO: 120314 - DNA, 25 bp, Homo sapien
tttgacaacgggagtcttcgaccat

SEQ ID NO: 120315 - DNA, 25 bp, Homo sapien
gaacgacgtgctactcttacttcta

SEQ ID NO: 120316 - DNA, 25 bp, Homo sapien
gaacgacgtgcttctcttacttcta

SEQ ID NO: 120317 - DNA, 25 bp, Homo sapien
gtggagtagcagcacgtcttactcc

SEQ ID NO: 120318 - DNA, 25 bp, Homo sapien
gtggagtagcaggacgtcttactcc

SEQ ID NO: 120319 - DNA, 25 bp, Homo sapien
cgctgtgtgacctccgggtgctctc

SEQ ID NO: 120320 - DNA, 25 bp, Homo sapien
cgctgtgtgaccaccgggtgctctc

SEQ ID NO: 120321 - DNA, 25 bp, Homo sapien
tgtgccttggggtatgggaggtcct

SEQ ID NO: 120322 - DNA, 25 bp, Homo sapien
tgtgccttggggaatgggaggtcct

SEQ ID NO: 120323 - DNA, 25 bp, Homo sapien
tccttagggtaaatgggacgtcgcc

SEQ ID NO: 120324 - DNA, 25 bp, Homo sapien
tccttagggtaattgggacgtcgcc

SEQ ID NO: 120325 - DNA, 25 bp, Homo sapien
cttagaggtaacgtgctcagagaag

SEQ ID NO: 120326 - DNA, 25 bp, Homo sapien
cttagaggtaacctgctcagagaag

SEQ ID NO: 120327 - DNA, 25 bp, Homo sapien
catcgactattaccttttggacacg

SEQ ID NO: 120328 - DNA, 25 bp, Homo sapien
catcgactattagcttttggacacg

SEQ ID NO: 120329 - DNA, 25 bp, Homo sapien
gtttacgaaataccttattgacaga

SEQ ID NO: 120330 - DNA, 25 bp, Homo sapien
gtttacgaaatagcttattgacaga

SEQ ID NO: 120331 - DNA, 25 bp, Homo sapien
tgtcaggacaaacacgattctaaga

SEQ ID NO: 120332 - DNA, 25 bp, Homo sapien
tgtcaggacaaagacgattctaaga

SEQ ID NO: 120333 - DNA, 25 bp, Homo sapien
aacgtagacagacacgcctacctca

SEQ ID NO: 120334 - DNA, 25 bp, Homo sapien
aacgtagacagagacgcctacctca

SEQ ID NO: 120335 - DNA, 25 bp, Homo sapien
taatacagcggcaactcaagccagt

SEQ ID NO: 120336 - DNA, 25 bp, Homo sapien
taatacagcggctactcaagccagt

SEQ ID NO: 120337 - DNA, 25 bp, Homo sapien
actagtaatgactcacaacactcgg

SEQ ID NO: 120338 - DNA, 25 bp, Homo sapien
actagtaatgacacacaacactcgg

SEQ ID NO: 120339 - DNA, 25 bp, Homo sapien
gtcgtatagtttatcccagtaaagg

SEQ ID NO: 120340 - DNA, 25 bp, Homo sapien
gtcgtatagtttttcccagtaaagg

SEQ ID NO: 120341 - DNA, 25 bp, Homo sapien
agaaattctccttagaatacagtag

SEQ ID NO: 120342 - DNA, 25 bp, Homo sapien
agaaattctcctaagaatacagtag

SEQ ID NO: 120343 - DNA, 25 bp, Homo sapien
gaagacatccctatcgatagcatgt

SEQ ID NO: 120344 - DNA, 25 bp, Homo sapien
gaagacatccctttcgatagcatgt

SEQ ID NO: 120345 - DNA, 25 bp, Homo sapien
ctctactgcccagtcttcttcgtag

SEQ ID NO: 120346 - DNA, 25 bp, Homo sapien
ctctactgcccactcttcttcgtag

SEQ ID NO: 120347 - DNA, 25 bp, Homo sapien
gtatatcccaacatcaactagtcgg

SEQ ID NO: 120348 - DNA, 25 bp, Homo sapien
gtatatcccaacttcaactagtcgg

SEQ ID NO: 120349 - DNA, 25 bp, Homo sapien
gtagaaccacaaagtacaactgtgg

SEQ ID NO: 120350 - DNA, 25 bp, Homo sapien
gtagaaccacaatgtacaactgtgg

SEQ ID NO: 120351 - DNA, 25 bp, Homo sapien
ttgtaggaccctatcgtcatttaga

SEQ ID NO: 120352 - DNA, 25 bp, Homo sapien
ttgtaggaccctttcgtcatttaga

SEQ ID NO: 120353 - DNA, 25 bp, Homo sapien
tggttactcgatcgtctctgtacaa

SEQ ID NO: 120354 - DNA, 25 bp, Homo sapien
tggttactcgatggtctctgtacaa

SEQ ID NO: 120355 - DNA, 25 bp, Homo sapien
agctacgaccctcagttaccatagg

SEQ ID NO: 120356 - DNA, 25 bp, Homo sapien
agctacgaccctgagttaccatagg

SEQ ID NO: 120357 - DNA, 25 bp, Homo sapien
aagggtagtacctctcgggacacac

SEQ ID NO: 120358 - DNA, 25 bp, Homo sapien
aagggtagtaccactcgggacacac

SEQ ID NO: 120359 - DNA, 25 bp, Homo sapien
gaaagaagactcatatcgggacctt

SEQ ID NO: 120360 - DNA, 25 bp, Homo sapien
gaaagaagactcttatcgggacctt

SEQ ID NO: 120361 - DNA, 25 bp, Homo sapien
gaaggttaactgtaacggaacactc

SEQ ID NO: 120362 - DNA, 25 bp, Homo sapien
gaaggttaactgaaacggaacactc

SEQ ID NO: 120363 - DNA, 25 bp, Homo sapien
acgattcctcgagtagttgttatac

SEQ ID NO: 120364 - DNA, 25 bp, Homo sapien
acgattcctcgactagttgttatac

SEQ ID NO: 120365 - DNA, 25 bp, Homo sapien
actgtatcgcaatcattggtacgac

SEQ ID NO: 120366 - DNA, 25 bp, Homo sapien
actgtatcgcaaacattggtacgac

SEQ ID NO: 120367 - DNA, 25 bp, Homo sapien
ccccttattgacatccgtaaggacc

SEQ ID NO: 120368 - DNA, 25 bp, Homo sapien
ccccttattgacttccgtaaggacc

SEQ ID NO: 120369 - DNA, 25 bp, Homo sapien
cctctaatgtgaccacccggtgtca

SEQ ID NO: 120370 - DNA, 25 bp, Homo sapien
cctctaatgtgagcacccggtgtca

SEQ ID NO: 120371 - DNA, 25 bp, Homo sapien
ccggaagttatgacccgtcgaggtg

SEQ ID NO: 120372 - DNA, 25 bp, Homo sapien
ccggaagttatgtcccgtcgaggtg

SEQ ID NO: 120373 - DNA, 25 bp, Homo sapien
gatcgtcttcctcagtgtccgagtc

SEQ ID NO: 120374 - DNA, 25 bp, Homo sapien
gatcgtcttcctgagtgtccgagtc

SEQ ID NO: 120375 - DNA, 25 bp, Homo sapien
ggatgatgttacctaattaccatac

SEQ ID NO: 120376 - DNA, 25 bp, Homo sapien
ggatgatgttacgtaattaccatac

SEQ ID NO: 120377 - DNA, 25 bp, Homo sapien
tgtgcacgtgaagaaataacctttt

SEQ ID NO: 120378 - DNA, 25 bp, Homo sapien
tgtgcacgtgaacaaataacctttt

SEQ ID NO: 120379 - DNA, 25 bp, Homo sapien
gtgtctgaccaaaagacccttctcc

SEQ ID NO: 120380 - DNA, 25 bp, Homo sapien
gtgtctgaccaatagacccttctcc

SEQ ID NO: 120381 - DNA, 25 bp, Homo sapien
ggggtccctttacctctcttatcac

SEQ ID NO: 120382 - DNA, 25 bp, Homo sapien
ggggtccctttagctctcttatcac

SEQ ID NO: 120383 - DNA, 25 bp, Homo sapien
gggatctccttaagatgtcttaaca

SEQ ID NO: 120384 - DNA, 25 bp, Homo sapien
gggatctccttatgatgtcttaaca

SEQ ID NO: 120385 - DNA, 25 bp, Homo sapien
gtcactgttgcctcttgtccgtgga

SEQ ID NO: 120386 - DNA, 25 bp, Homo sapien
gtcactgttgccacttgtccgtgga

SEQ ID NO: 120387 - DNA, 25 bp, Homo sapien
tatgtagttcctgtttgggtcgacg

SEQ ID NO: 120388 - DNA, 25 bp, Homo sapien
tatgtagttcctctttgggtcgacg

SEQ ID NO: 120389 - DNA, 25 bp, Homo sapien
atctgttacccctgttgatactcgc

SEQ ID NO: 120390 - DNA, 25 bp, Homo sapien
atctgttaccccagttgatactcgc

SEQ ID NO: 120391 - DNA, 25 bp, Homo sapien
aactttccggaatgtacgatctata

SEQ ID NO: 120392 - DNA, 25 bp, Homo sapien
aactttccggaaagtacgatctata

SEQ ID NO: 120393 - DNA, 25 bp, Homo sapien
gaattgtccgttacccgcctagtac

SEQ ID NO: 120394 - DNA, 25 bp, Homo sapien
gaattgtccgtttcccgcctagtac

SEQ ID NO: 120395 - DNA, 25 bp, Homo sapien
atatgtgtgcggaaccactccgtgg

SEQ ID NO: 120396 - DNA, 25 bp, Homo sapien
atatgtgtgcggtaccactccgtgg

SEQ ID NO: 120397 - DNA, 25 bp, Homo sapien
tgtctgtaggggtaaacgacacaca

SEQ ID NO: 120398 - DNA, 25 bp, Homo sapien
tgtctgtaggggaaaacgacacaca

SEQ ID NO: 120399 - DNA, 25 bp, Homo sapien
agtcaggtgaaggtgaagtctctcc

SEQ ID NO: 120400 - DNA, 25 bp, Homo sapien
agtcaggtgaagctgaagtctctcc

SEQ ID NO: 120401 - DNA, 25 bp, Homo sapien
tccatcataggaaggtcaagtcccc

SEQ ID NO: 120402 - DNA, 25 bp, Homo sapien
tccatcataggatggtcaagtcccc

SEQ ID NO: 120403 - DNA, 25 bp, Homo sapien
ctttcgacagaatcggtcaaacccc

SEQ ID NO: 120404 - DNA, 25 bp, Homo sapien
ctttcgacagaaacggtcaaacccc

SEQ ID NO: 120405 - DNA, 25 bp, Homo sapien
ctccagagacgtgagaaacccccga

SEQ ID NO: 120406 - DNA, 25 bp, Homo sapien
ctccagagacgtcagaaacccccga

SEQ ID NO: 120407 - DNA, 25 bp, Homo sapien
ctcttcggaggtcagaaacccatcc

SEQ ID NO: 120408 - DNA, 25 bp, Homo sapien
ctcttcggaggtgagaaacccatcc

SEQ ID NO: 120409 - DNA, 25 bp, Homo sapien
gttgtcggacgggaagtcccagcct

SEQ ID NO: 120410 - DNA, 25 bp, Homo sapien
gttgtcggacggcaagtcccagcct

SEQ ID NO: 120411 - DNA, 25 bp, Homo sapien
actggtcgagaagacttctccatcc

SEQ ID NO: 120412 - DNA, 25 bp, Homo sapien
actggtcgagaacacttctccatcc

SEQ ID NO: 120413 - DNA, 25 bp, Homo sapien
tcgagaagaacgtcctccacgtaaa

SEQ ID NO: 120414 - DNA, 25 bp, Homo sapien
tcgagaagaacgacctccacgtaaa

SEQ ID NO: 120415 - DNA, 25 bp, Homo sapien
cggaagaaaattgtgacactaacga

SEQ ID NO: 120416 - DNA, 25 bp, Homo sapien
cggaagaaaattctgacactaacga

SEQ ID NO: 120417 - DNA, 25 bp, Homo sapien
gagtacgaagaaactcctttcttca

SEQ ID NO: 120418 - DNA, 25 bp, Homo sapien
gagtacgaagaatctcctttcttca

SEQ ID NO: 120419 - DNA, 25 bp, Homo sapien
agacgagagtaggtaccaattttca

SEQ ID NO: 120420 - DNA, 25 bp, Homo sapien
agacgagagtagctaccaattttca

SEQ ID NO: 120421 - DNA, 25 bp, Homo sapien
aacttatcgaacctcctttgtgtta

SEQ ID NO: 120422 - DNA, 25 bp, Homo sapien
aacttatcgaacgtcctttgtgtta

SEQ ID NO: 120423 - DNA, 25 bp, Homo sapien
tactacgtcaacacgttttaggtga

SEQ ID NO: 120424 - DNA, 25 bp, Homo sapien
tactacgtcaactcgttttaggtga

SEQ ID NO: 120425 - DNA, 25 bp, Homo sapien
tggtctcggcgaagccctaggtgtc

SEQ ID NO: 120426 - DNA, 25 bp, Homo sapien
tggtctcggcgatgccctaggtgtc

SEQ ID NO: 120427 - DNA, 25 bp, Homo sapien
tgtcgctgtgcgacccgagccgtgc

SEQ ID NO: 120428 - DNA, 25 bp, Homo sapien
tgtcgctgtgcgtcccgagccgtgc

SEQ ID NO: 120429 - DNA, 25 bp, Homo sapien
gtgggatctacttcgcgaacaggac

SEQ ID NO: 120430 - DNA, 25 bp, Homo sapien
gtgggatctactacgcgaacaggac

SEQ ID NO: 120431 - DNA, 25 bp, Homo sapien
cggtaccatcctagggtacggcgac

SEQ ID NO: 120432 - DNA, 25 bp, Homo sapien
cggtaccatccttgggtacggcgac

SEQ ID NO: 120433 - DNA, 25 bp, Homo sapien
cacttggtggaagaaagacactcgt

SEQ ID NO: 120434 - DNA, 25 bp, Homo sapien
cacttggtggaacaaagacactcgt

SEQ ID NO: 120435 - DNA, 25 bp, Homo sapien
taactgtgagtgtaaaaatcctacc

SEQ ID NO: 120436 - DNA, 25 bp, Homo sapien
taactgtgagtgaaaaaatcctacc

SEQ ID NO: 120437 - DNA, 25 bp, Homo sapien
tctaaggttcggacaaatatcttga

SEQ ID NO: 120438 - DNA, 25 bp, Homo sapien
tctaaggttcggtcaaatatcttga

SEQ ID NO: 120439 - DNA, 25 bp, Homo sapien
gaaggtatttcgagctcatcttata

SEQ ID NO: 120440 - DNA, 25 bp, Homo sapien
gaaggtatttcgtgctcatcttata

SEQ ID NO: 120441 - DNA, 25 bp, Homo sapien
accgtgtctcgcatgaccacttttt

SEQ ID NO: 120442 - DNA, 25 bp, Homo sapien
accgtgtctcgcttgaccacttttt

SEQ ID NO: 120443 - DNA, 25 bp, Homo sapien
gtctccggtgacacttctctctcaa

SEQ ID NO: 120444 - DNA, 25 bp, Homo sapien
gtctccggtgactcttctctctcaa

SEQ ID NO: 120445 - DNA, 25 bp, Homo sapien
tgacgtttatgttgtagctacctca

SEQ ID NO: 120446 - DNA, 25 bp, Homo sapien
tgacgtttatgtagtagctacctca

SEQ ID NO: 120447 - DNA, 25 bp, Homo sapien
gtcggagttgtctttaccatagacg

SEQ ID NO: 120448 - DNA, 25 bp, Homo sapien
gtcggagttgtcattaccatagacg

SEQ ID NO: 120449 - DNA, 25 bp, Homo sapien
ccttaggacgtcgtactctttccca

SEQ ID NO: 120450 - DNA, 25 bp, Homo sapien
ccttaggacgtcctactctttccca

SEQ ID NO: 120451 - DNA, 25 bp, Homo sapien
agtcttttgaggtatctgatcccga

SEQ ID NO: 120452 - DNA, 25 bp, Homo sapien
agtcttttgaggaatctgatcccga

SEQ ID NO: 120453 - DNA, 25 bp, Homo sapien
tttcttctgtggaaagtgtccgaaa

SEQ ID NO: 120454 - DNA, 25 bp, Homo sapien
tttcttctgtggtaagtgtccgaaa

SEQ ID NO: 120455 - DNA, 25 bp, Homo sapien
ttgtcttgactgtaagactcgataa

SEQ ID NO: 120456 - DNA, 25 bp, Homo sapien
ttgtcttgactgaaagactcgataa

SEQ ID NO: 120457 - DNA, 25 bp, Homo sapien
ttactcctttcgtttgaccggtagc

SEQ ID NO: 120458 - DNA, 25 bp, Homo sapien
ttactcctttcgattgaccggtagc

SEQ ID NO: 120459 - DNA, 25 bp, Homo sapien
ttactaccacttcgtctttcgggag

SEQ ID NO: 120460 - DNA, 25 bp, Homo sapien
ttactaccacttggtctttcgggag

SEQ ID NO: 120461 - DNA, 25 bp, Homo sapien
ttacgtttcggtggtttctcaggtg

SEQ ID NO: 120462 - DNA, 25 bp, Homo sapien
ttacgtttcggtcgtttctcaggtg

SEQ ID NO: 120463 - DNA, 25 bp, Homo sapien
ctgtttctcggagtacttccgaaga

SEQ ID NO: 120464 - DNA, 25 bp, Homo sapien
ctgtttctcggactacttccgaaga

SEQ ID NO: 120465 - DNA, 25 bp, Homo sapien
tgttacgacattgcttggagacgta

SEQ ID NO: 120466 - DNA, 25 bp, Homo sapien
tgttacgacattccttggagacgta

SEQ ID NO: 120467 - DNA, 25 bp, Homo sapien
cggtttttaaagtcctctgagtaga

SEQ ID NO: 120468 - DNA, 25 bp, Homo sapien
cggtttttaaagacctctgagtaga

SEQ ID NO: 120469 - DNA, 25 bp, Homo sapien
gacggttttcgaaaaacccttagga

SEQ ID NO: 120470 - DNA, 25 bp, Homo sapien
gacggttttcgataaacccttagga

SEQ ID NO: 120471 - DNA, 25 bp, Homo sapien
gattgtagaaatcactctcagtgaa

SEQ ID NO: 120472 - DNA, 25 bp, Homo sapien
gattgtagaaatgactctcagtgaa

SEQ ID NO: 120473 - DNA, 25 bp, Homo sapien
gactgtgtgaaacgacgctccggca

SEQ ID NO: 120474 - DNA, 25 bp, Homo sapien
gactgtgtgaaaggacgctccggca

SEQ ID NO: 120475 - DNA, 25 bp, Homo sapien
catctcggtgtaaaggttctttaga

SEQ ID NO: 120476 - DNA, 25 bp, Homo sapien
catctcggtgtataggttctttaga

SEQ ID NO: 120477 - DNA, 25 bp, Homo sapien
tcaaatgatcgacgtttccattatg

SEQ ID NO: 120478 - DNA, 25 bp, Homo sapien
tcaaatgatcgaggtttccattatg

SEQ ID NO: 120479 - DNA, 25 bp, Homo sapien
caagggagatctcctacattacgtg

SEQ ID NO: 120480 - DNA, 25 bp, Homo sapien
caagggagatctgctacattacgtg

SEQ ID NO: 120481 - DNA, 25 bp, Homo sapien
cactccgaggatcgtccactctaag

SEQ ID NO: 120482 - DNA, 25 bp, Homo sapien
cactccgaggatggtccactctaag

SEQ ID NO: 120483 - DNA, 25 bp, Homo sapien
acctccaagtctagctcctctagag

SEQ ID NO: 120484 - DNA, 25 bp, Homo sapien
acctccaagtcttgctcctctagag

SEQ ID NO: 120485 - DNA, 25 bp, Homo sapien
ctgattcaactttagagaccacaag

SEQ ID NO: 120486 - DNA, 25 bp, Homo sapien
ctgattcaacttaagagaccacaag

SEQ ID NO: 120487 - DNA, 25 bp, Homo sapien
gttaagactataaacgtgcacatat

SEQ ID NO: 120488 - DNA, 25 bp, Homo sapien
gttaagactatatacgtgcacatat

SEQ ID NO: 120489 - DNA, 25 bp, Homo sapien
aggtctcccttcagtcgtccaactt

SEQ ID NO: 120490 - DNA, 25 bp, Homo sapien
aggtctcccttctgtcgtccaactt

SEQ ID NO: 120491 - DNA, 25 bp, Homo sapien
taccgcttctctgtgtcgacctcgt

SEQ ID NO: 120492 - DNA, 25 bp, Homo sapien
taccgcttctctctgtcgacctcgt

SEQ ID NO: 120493 - DNA, 25 bp, Homo sapien
ttgcggctcctcttctggctcgcgt

SEQ ID NO: 120494 - DNA, 25 bp, Homo sapien
ttgcggctcctcatctggctcgcgt

SEQ ID NO: 120495 - DNA, 25 bp, Homo sapien
gtcgcagttctctcagggactcact

SEQ ID NO: 120496 - DNA, 25 bp, Homo sapien
gtcgcagttctcacagggactcact

SEQ ID NO: 120497 - DNA, 25 bp, Homo sapien
caggacctcaactgtgagtacaagt

SEQ ID NO: 120498 - DNA, 25 bp, Homo sapien
caggacctcaacagtgagtacaagt

SEQ ID NO: 120499 - DNA, 25 bp, Homo sapien
ctctcggggtcgacccgtgaacaat

SEQ ID NO: 120500 - DNA, 25 bp, Homo sapien
ctctcggggtcgtcccgtgaacaat

SEQ ID NO: 120501 - DNA, 25 bp, Homo sapien
tgtactcttgtgtcgtctgaaggga

SEQ ID NO: 120502 - DNA, 25 bp, Homo sapien
tgtactcttgtgacgtctgaaggga

SEQ ID NO: 120503 - DNA, 25 bp, Homo sapien
gaccagtcgaacatctcgtggagga

SEQ ID NO: 120504 - DNA, 25 bp, Homo sapien
gaccagtcgaacttctcgtggagga

SEQ ID NO: 120505 - DNA, 25 bp, Homo sapien
gggaccttcactaccagctcgcgaa

SEQ ID NO: 120506 - DNA, 25 bp, Homo sapien
gggaccttcacttccagctcgcgaa

SEQ ID NO: 120507 - DNA, 25 bp, Homo sapien
tgataagtcactagtggctccgaga

SEQ ID NO: 120508 - DNA, 25 bp, Homo sapien
tgataagtcacttgtggctccgaga

SEQ ID NO: 120509 - DNA, 25 bp, Homo sapien
ggggacacctgctgtctccgtacct

SEQ ID NO: 120510 - DNA, 25 bp, Homo sapien
ggggacacctgcagtctccgtacct

SEQ ID NO: 120511 - DNA, 25 bp, Homo sapien
tgtgtgagacgttcaagattcggac

SEQ ID NO: 120512 - DNA, 25 bp, Homo sapien
tgtgtgagacgtacaagattcggac

SEQ ID NO: 120513 - DNA, 25 bp, Homo sapien
gtgtctatgtgagaaccacatcccc

SEQ ID NO: 120514 - DNA, 25 bp, Homo sapien
gtgtctatgtgacaaccacatcccc

SEQ ID NO: 120515 - DNA, 25 bp, Homo sapien
tttttgttatgtttctcactttcct

SEQ ID NO: 120516 - DNA, 25 bp, Homo sapien
tttttgttatgtatctcactttcct

SEQ ID NO: 120517 - DNA, 25 bp, Homo sapien
gtttcgttttcaaatgatgttactc

SEQ ID NO: 120518 - DNA, 25 bp, Homo sapien
gtttcgttttcatatgatgttactc

SEQ ID NO: 120519 - DNA, 25 bp, Homo sapien
gtcttcttgtatagcccccggtccg

SEQ ID NO: 120520 - DNA, 25 bp, Homo sapien
gtcttcttgtattgcccccggtccg

SEQ ID NO: 120521 - DNA, 25 bp, Homo sapien
tgttgtctgcgactccatctctcgt

SEQ ID NO: 120522 - DNA, 25 bp, Homo sapien
tgttgtctgcgagtccatctctcgt

SEQ ID NO: 120523 - DNA, 25 bp, Homo sapien
gtgtttgtctcgttcgcagcgtcgg

SEQ ID NO: 120524 - DNA, 25 bp, Homo sapien
gtgtttgtctcgatcgcagcgtcgg

SEQ ID NO: 120525 - DNA, 25 bp, Homo sapien
gcctcatctttccatccatgcgagt

SEQ ID NO: 120526 - DNA, 25 bp, Homo sapien
gcctcatctttcgatccatgcgagt

SEQ ID NO: 120527 - DNA, 25 bp, Homo sapien
gtctgaaccggttttatcatgttgg

SEQ ID NO: 120528 - DNA, 25 bp, Homo sapien
gtctgaaccggtattatcatgttgg

SEQ ID NO: 120529 - DNA, 25 bp, Homo sapien
cgtaagacacgtattttcaattgta

SEQ ID NO: 120530 - DNA, 25 bp, Homo sapien
cgtaagacacgttttttcaattgta

SEQ ID NO: 120531 - DNA, 25 bp, Homo sapien
caaacctcttgtctcacgagtcaag

SEQ ID NO: 120532 - DNA, 25 bp, Homo sapien
caaacctcttgtgtcacgagtcaag

SEQ ID NO: 120533 - DNA, 25 bp, Homo sapien
gaaagtctgtcctccgtgaaccaag

SEQ ID NO: 120534 - DNA, 25 bp, Homo sapien
gaaagtctgtccaccgtgaaccaag

SEQ ID NO: 120535 - DNA, 25 bp, Homo sapien
ttcgaacaccggtgacgaccgaccg

SEQ ID NO: 120536 - DNA, 25 bp, Homo sapien
ttcgaacaccggagacgaccgaccg

SEQ ID NO: 120537 - DNA, 25 bp, Homo sapien
acatcactacggagtcgtaccccgt

SEQ ID NO: 120538 - DNA, 25 bp, Homo sapien
acatcactacggtgtcgtaccccgt

SEQ ID NO: 120539 - DNA, 25 bp, Homo sapien
agtgtaccgaaggagggactcctcg

SEQ ID NO: 120540 - DNA, 25 bp, Homo sapien
agtgtaccgaagcagggactcctcg

SEQ ID NO: 120541 - DNA, 25 bp, Homo sapien
gtcgacgagtactcctgcacgtgcc

SEQ ID NO: 120542 - DNA, 25 bp, Homo sapien
gtcgacgagtacacctgcacgtgcc

SEQ ID NO: 120543 - DNA, 25 bp, Homo sapien
gtgtatggtcatcgtgctactcgaa

SEQ ID NO: 120544 - DNA, 25 bp, Homo sapien
gtgtatggtcatggtgctactcgaa

SEQ ID NO: 120545 - DNA, 25 bp, Homo sapien
agggggtttatatcgtcctccggac

SEQ ID NO: 120546 - DNA, 25 bp, Homo sapien
agggggtttataacgtcctccggac

SEQ ID NO: 120547 - DNA, 25 bp, Homo sapien
gagactgaccttagacctctcactc

SEQ ID NO: 120548 - DNA, 25 bp, Homo sapien
gagactgacctttgacctctcactc

SEQ ID NO: 120549 - DNA, 25 bp, Homo sapien
gttactcctaggtccactgtcagag

SEQ ID NO: 120550 - DNA, 25 bp, Homo sapien
gttactcctaggaccactgtcagag

SEQ ID NO: 120551 - DNA, 25 bp, Homo sapien
tgtaagtcacttctacaacgacaga

SEQ ID NO: 120552 - DNA, 25 bp, Homo sapien
tgtaagtcacttgtacaacgacaga

SEQ ID NO: 120553 - DNA, 25 bp, Homo sapien
tctatggtgtccacaggatcgaaca

SEQ ID NO: 120554 - DNA, 25 bp, Homo sapien
tctatggtgtcctcaggatcgaaca

SEQ ID NO: 120555 - DNA, 25 bp, Homo sapien
ttatggtcaccatcgggaccccggt

SEQ ID NO: 120556 - DNA, 25 bp, Homo sapien
ttatggtcaccaacgggaccccggt

SEQ ID NO: 120557 - DNA, 25 bp, Homo sapien
tatgggtacccgacggtgtaccccc

SEQ ID NO: 120558 - DNA, 25 bp, Homo sapien
tatgggtacccgtcggtgtaccccc

SEQ ID NO: 120559 - DNA, 25 bp, Homo sapien
agtcgctacgtttgagtaatccctc

SEQ ID NO: 120560 - DNA, 25 bp, Homo sapien
agtcgctacgttagagtaatccctc

SEQ ID NO: 120561 - DNA, 25 bp, Homo sapien
ttgagtgacccgaagtacttctacg

SEQ ID NO: 120562 - DNA, 25 bp, Homo sapien
ttgagtgacccgtagtacttctacg

SEQ ID NO: 120563 - DNA, 25 bp, Homo sapien
cttttgctaccgtatacgttactgt

SEQ ID NO: 120564 - DNA, 25 bp, Homo sapien
cttttgctaccgaatacgttactgt

SEQ ID NO: 120565 - DNA, 25 bp, Homo sapien
cctaccagggtccgaacctcagacg

SEQ ID NO: 120566 - DNA, 25 bp, Homo sapien
cctaccagggtcggaacctcagacg

SEQ ID NO: 120567 - DNA, 25 bp, Homo sapien
ccctacttggtgcaatgtctcctac

SEQ ID NO: 120568 - DNA, 25 bp, Homo sapien
ccctacttggtggaatgtctcctac

SEQ ID NO: 120569 - DNA, 25 bp, Homo sapien
cctttggagtgtcagtgttcagtgt

SEQ ID NO: 120570 - DNA, 25 bp, Homo sapien
cctttggagtgtgagtgttcagtgt

SEQ ID NO: 120571 - DNA, 25 bp, Homo sapien
cgtcggatcgtgtatctacagtcgt

SEQ ID NO: 120572 - DNA, 25 bp, Homo sapien
cgtcggatcgtgaatctacagtcgt

SEQ ID NO: 120573 - DNA, 25 bp, Homo sapien
gctcgggcgtacacgacgtccgtcg

SEQ ID NO: 120574 - DNA, 25 bp, Homo sapien
gctcgggcgtactcgacgtccgtcg

SEQ ID NO: 120575 - DNA, 25 bp, Homo sapien
ccagtcacgaggtgttcgtcgtcca

SEQ ID NO: 120576 - DNA, 25 bp, Homo sapien
ccagtcacgaggagttcgtcgtcca

SEQ ID NO: 120577 - DNA, 25 bp, Homo sapien
acccaagggggtaagatgttcgaat

SEQ ID NO: 120578 - DNA, 25 bp, Homo sapien
acccaagggggttagatgttcgaat

SEQ ID NO: 120579 - DNA, 25 bp, Homo sapien
caacaatggtgttcggtttcgaact

SEQ ID NO: 120580 - DNA, 25 bp, Homo sapien
caacaatggtgtacggtttcgaact

SEQ ID NO: 120581 - DNA, 25 bp, Homo sapien
cacgactcggcgtgagctgtcgtga

SEQ ID NO: 120582 - DNA, 25 bp, Homo sapien
cacgactcggcgagagctgtcgtga

SEQ ID NO: 120583 - DNA, 25 bp, Homo sapien
cactacgggtgctactcgcagtact

SEQ ID NO: 120584 - DNA, 25 bp, Homo sapien
cactacgggtgcaactcgcagtact

SEQ ID NO: 120585 - DNA, 25 bp, Homo sapien
ccaccagtagagtagagtaccatat

SEQ ID NO: 120586 - DNA, 25 bp, Homo sapien
ccaccagtagagaagagtaccatat

SEQ ID NO: 120587 - DNA, 25 bp, Homo sapien
acgaagaggacgagaaacatactac

SEQ ID NO: 120588 - DNA, 25 bp, Homo sapien
acgaagaggacgtgaaacatactac

SEQ ID NO: 120589 - DNA, 25 bp, Homo sapien
acatgacgtagaacggggtcgtaaa

SEQ ID NO: 120590 - DNA, 25 bp, Homo sapien
acatgacgtagatcggggtcgtaaa

SEQ ID NO: 120591 - DNA, 25 bp, Homo sapien
ggaacatctgtaacggctacccgta

SEQ ID NO: 120592 - DNA, 25 bp, Homo sapien
ggaacatctgtatcggctacccgta

SEQ ID NO: 120593 - DNA, 25 bp, Homo sapien
ggaaccttcttttcggtacccgacg

SEQ ID NO: 120594 - DNA, 25 bp, Homo sapien
ggaaccttctttacggtacccgacg

SEQ ID NO: 120595 - DNA, 25 bp, Homo sapien
gaggacttactctaatagaacctgg

SEQ ID NO: 120596 - DNA, 25 bp, Homo sapien
gaggacttactcaaatagaacctgg

SEQ ID NO: 120597 - DNA, 25 bp, Homo sapien
ttttatgtctgaaacttagaattct

SEQ ID NO: 120598 - DNA, 25 bp, Homo sapien
ttttatgtctgatacttagaattct

SEQ ID NO: 120599 - DNA, 25 bp, Homo sapien
tgtctaatccatgacgttgaaatat

SEQ ID NO: 120600 - DNA, 25 bp, Homo sapien
tgtctaatccatcacgttgaaatat

SEQ ID NO: 120601 - DNA, 25 bp, Homo sapien
aggccgaggagtttccggcgtttca

SEQ ID NO: 120602 - DNA, 25 bp, Homo sapien
aggccgaggagtatccggcgtttca

SEQ ID NO: 120603 - DNA, 25 bp, Homo sapien
ttcagtagaagttatcccgtttttg

SEQ ID NO: 120604 - DNA, 25 bp, Homo sapien
ttcagtagaagtaatcccgtttttg

SEQ ID NO: 120605 - DNA, 25 bp, Homo sapien
atgtgacgggagacctttcggtttg

SEQ ID NO: 120606 - DNA, 25 bp, Homo sapien
atgtgacgggagtcctttcggtttg

SEQ ID NO: 120607 - DNA, 25 bp, Homo sapien
cttcctttttacttcctcagtgtgg

SEQ ID NO: 120608 - DNA, 25 bp, Homo sapien
cttcctttttacatcctcagtgtgg

SEQ ID NO: 120609 - DNA, 25 bp, Homo sapien
cgaataccttttcaccctcttggcg

SEQ ID NO: 120610 - DNA, 25 bp, Homo sapien
cgaataccttttgaccctcttggcg

SEQ ID NO: 120611 - DNA, 25 bp, Homo sapien
tctcctgtcctaggacggtgggtcg

SEQ ID NO: 120612 - DNA, 25 bp, Homo sapien
tctcctgtcctacgacggtgggtcg

SEQ ID NO: 120613 - DNA, 25 bp, Homo sapien
catcattccctcgacgtgaagttcg

SEQ ID NO: 120614 - DNA, 25 bp, Homo sapien
catcattccctccacgtgaagttcg

SEQ ID NO: 120615 - DNA, 25 bp, Homo sapien
tttatttaccccgtcatgtggtaca

SEQ ID NO: 120616 - DNA, 25 bp, Homo sapien
tttatttaccccctcatgtggtaca

SEQ ID NO: 120617 - DNA, 25 bp, Homo sapien
tgtttataccatcataaagtttaca

SEQ ID NO: 120618 - DNA, 25 bp, Homo sapien
tgtttataccatgataaagtttaca

SEQ ID NO: 120619 - DNA, 25 bp, Homo sapien
tcttctagcatggtctatttcacgg

SEQ ID NO: 120620 - DNA, 25 bp, Homo sapien
tcttctagcatgctctatttcacgg

SEQ ID NO: 120621 - DNA, 25 bp, Homo sapien
tttgcgctatcctgtctattgtctg

SEQ ID NO: 120622 - DNA, 25 bp, Homo sapien
tttgcgctatccagtctattgtctg

SEQ ID NO: 120623 - DNA, 25 bp, Homo sapien
attttaacacgtttttcatttcgtg

SEQ ID NO: 120624 - DNA, 25 bp, Homo sapien
attttaacacgtatttcatttcgtg

SEQ ID NO: 120625 - DNA, 25 bp, Homo sapien
cgtcaagtaacgtcctctttttctg

SEQ ID NO: 120626 - DNA, 25 bp, Homo sapien
cgtcaagtaacgacctctttttctg

SEQ ID NO: 120627 - DNA, 25 bp, Homo sapien
acaaatgacttctgactattggtcg

SEQ ID NO: 120628 - DNA, 25 bp, Homo sapien
acaaatgacttcagactattggtcg

SEQ ID NO: 120629 - DNA, 25 bp, Homo sapien
tgaacagaggagtttgacacatttc

SEQ ID NO: 120630 - DNA, 25 bp, Homo sapien
tgaacagaggagattgacacatttc

SEQ ID NO: 120631 - DNA, 25 bp, Homo sapien
aaaaacgatatggtactccagtatc

SEQ ID NO: 120632 - DNA, 25 bp, Homo sapien
aaaaacgatatgctactccagtatc

SEQ ID NO: 120633 - DNA, 25 bp, Homo sapien
agaaaaggggttcgacgattgaacc

SEQ ID NO: 120634 - DNA, 25 bp, Homo sapien
agaaaaggggttggacgattgaacc

SEQ ID NO: 120635 - DNA, 25 bp, Homo sapien
gcaaggttttgtcgatttatacgtc

SEQ ID NO: 120636 - DNA, 25 bp, Homo sapien
gcaaggttttgtggatttatacgtc

SEQ ID NO: 120637 - DNA, 25 bp, Homo sapien
gacaatgtttgttccaccgttgtaa

SEQ ID NO: 120638 - DNA, 25 bp, Homo sapien
gacaatgtttgtaccaccgttgtaa

SEQ ID NO: 120639 - DNA, 25 bp, Homo sapien
tcctcggtccccatcagtacttgtg

SEQ ID NO: 120640 - DNA, 25 bp, Homo sapien
tcctcggtccccttcagtacttgtg

SEQ ID NO: 120641 - DNA, 25 bp, Homo sapien
tccctgttctcttccggacgggtcg

SEQ ID NO: 120642 - DNA, 25 bp, Homo sapien
tccctgttctctaccggacgggtcg

SEQ ID NO: 120643 - DNA, 25 bp, Homo sapien
gtgtcctaagtgtcagacccgggga

SEQ ID NO: 120644 - DNA, 25 bp, Homo sapien
gtgtcctaagtgacagacccgggga

SEQ ID NO: 120645 - DNA, 25 bp, Homo sapien
ttcataatcgatacgcagggtcgat

SEQ ID NO: 120646 - DNA, 25 bp, Homo sapien
ttcataatcgattcgcagggtcgat

SEQ ID NO: 120647 - DNA, 25 bp, Homo sapien
ccaatggagtcttacgtaacattct

SEQ ID NO: 120648 - DNA, 25 bp, Homo sapien
ccaatggagtctaacgtaacattct

SEQ ID NO: 120649 - DNA, 25 bp, Homo sapien
taatgtttgtctactacgtcattgt

SEQ ID NO: 120650 - DNA, 25 bp, Homo sapien
taatgtttgtcttctacgtcattgt

SEQ ID NO: 120651 - DNA, 25 bp, Homo sapien
aatgttctacacgttgtccgtctct

SEQ ID NO: 120652 - DNA, 25 bp, Homo sapien
aatgttctacaccttgtccgtctct

SEQ ID NO: 120653 - DNA, 25 bp, Homo sapien
ccggttcgtgtccattctactactt

SEQ ID NO: 120654 - DNA, 25 bp, Homo sapien
ccggttcgtgtcgattctactactt

SEQ ID NO: 120655 - DNA, 25 bp, Homo sapien
aactcgaggcgtggatgcactacgg

SEQ ID NO: 120656 - DNA, 25 bp, Homo sapien
aactcgaggcgtcgatgcactacgg

SEQ ID NO: 120657 - DNA, 25 bp, Homo sapien
tagactcaaggaggtcctcgaagtg

SEQ ID NO: 120658 - DNA, 25 bp, Homo sapien
tagactcaaggacgtcctcgaagtg

SEQ ID NO: 120659 - DNA, 25 bp, Homo sapien
gtccgtcaacaacgactccaggtcg

SEQ ID NO: 120660 - DNA, 25 bp, Homo sapien
gtccgtcaacaaggactccaggtcg

SEQ ID NO: 120661 - DNA, 25 bp, Homo sapien
cgtccacccatactgtccgtggtat

SEQ ID NO: 120662 - DNA, 25 bp, Homo sapien
cgtccacccatagtgtccgtggtat

SEQ ID NO: 120663 - DNA, 25 bp, Homo sapien
tcgtatccggccacgtttcgagcgc

SEQ ID NO: 120664 - DNA, 25 bp, Homo sapien
tcgtatccggcctcgtttcgagcgc

SEQ ID NO: 120665 - DNA, 25 bp, Homo sapien
atatactgcgcagtgtcttagatcc

SEQ ID NO: 120666 - DNA, 25 bp, Homo sapien
atatactgcgcactgtcttagatcc

SEQ ID NO: 120667 - DNA, 25 bp, Homo sapien
caggaaacgtttctgtctgtataca

SEQ ID NO: 120668 - DNA, 25 bp, Homo sapien
caggaaacgtttgtgtctgtataca

SEQ ID NO: 120669 - DNA, 25 bp, Homo sapien
tccggtggtgttgtgtgtcatctat

SEQ ID NO: 120670 - DNA, 25 bp, Homo sapien
tccggtggtgttctgtgtcatctat

SEQ ID NO: 120671 - DNA, 25 bp, Homo sapien
ccgtatcaaacctctcgtcggtgag

SEQ ID NO: 120672 - DNA, 25 bp, Homo sapien
ccgtatcaaaccactcgtcggtgag

SEQ ID NO: 120673 - DNA, 25 bp, Homo sapien
accccggggtcctgcctctggtgag

SEQ ID NO: 120674 - DNA, 25 bp, Homo sapien
accccggggtccagcctctggtgag

SEQ ID NO: 120675 - DNA, 25 bp, Homo sapien
cgtcctaacttggacccccgtggtt

SEQ ID NO: 120676 - DNA, 25 bp, Homo sapien
cgtcctaacttgcacccccgtggtt

SEQ ID NO: 120677 - DNA, 25 bp, Homo sapien
taatttccgacactgtcacctccgt

SEQ ID NO: 120678 - DNA, 25 bp, Homo sapien
taatttccgacagtgtcacctccgt

SEQ ID NO: 120679 - DNA, 25 bp, Homo sapien
aatgtaacactaagtcaaattacgt

SEQ ID NO: 120680 - DNA, 25 bp, Homo sapien
aatgtaacactatgtcaaattacgt

SEQ ID NO: 120681 - DNA, 25 bp, Homo sapien
gaagttcttcgtcgtataatactat

SEQ ID NO: 120682 - DNA, 25 bp, Homo sapien
gaagttcttcgtggtataatactat

SEQ ID NO: 120683 - DNA, 25 bp, Homo sapien
cgatttgtataggtgtacgaaccat

SEQ ID NO: 120684 - DNA, 25 bp, Homo sapien
cgatttgtatagctgtacgaaccat

SEQ ID NO: 120685 - DNA, 25 bp, Homo sapien
caggttgtaacgtcgacgatagttt

SEQ ID NO: 120686 - DNA, 25 bp, Homo sapien
caggttgtaacgacgacgatagttt

SEQ ID NO: 120687 - DNA, 25 bp, Homo sapien
caggagagttgaatcttccgttgtt

SEQ ID NO: 120688 - DNA, 25 bp, Homo sapien
caggagagttgattcttccgttgtt

SEQ ID NO: 120689 - DNA, 25 bp, Homo sapien
gggagtgtttattgactacttgtgt

SEQ ID NO: 120690 - DNA, 25 bp, Homo sapien
gggagtgtttatagactacttgtgt

SEQ ID NO: 120691 - DNA, 25 bp, Homo sapien
cgtcagtctatactttacttccggt

SEQ ID NO: 120692 - DNA, 25 bp, Homo sapien
cgtcagtctatagtttacttccggt

SEQ ID NO: 120693 - DNA, 25 bp, Homo sapien
ctcgtgttttaggtaaccttaacac

SEQ ID NO: 120694 - DNA, 25 bp, Homo sapien
ctcgtgttttagctaaccttaacac

SEQ ID NO: 120695 - DNA, 25 bp, Homo sapien
ctttagggtcttgtgagtcgggact

SEQ ID NO: 120696 - DNA, 25 bp, Homo sapien
ctttagggtcttctgagtcgggact

SEQ ID NO: 120697 - DNA, 25 bp, Homo sapien
taccaggtcgtcctggggtccgtga

SEQ ID NO: 120698 - DNA, 25 bp, Homo sapien
taccaggtcgtcgtggggtccgtga

SEQ ID NO: 120699 - DNA, 25 bp, Homo sapien
taccgaattatcacggttattgtgt

SEQ ID NO: 120700 - DNA, 25 bp, Homo sapien
taccgaattatctcggttattgtgt

SEQ ID NO: 120701 - DNA, 25 bp, Homo sapien
gttcgcaatcatgtcggttattctt

SEQ ID NO: 120702 - DNA, 25 bp, Homo sapien
gttcgcaatcatctcggttattctt

SEQ ID NO: 120703 - DNA, 25 bp, Homo sapien
atatcacctcctcgtcttgacttgg

SEQ ID NO: 120704 - DNA, 25 bp, Homo sapien
atatcacctcctggtcttgacttgg

SEQ ID NO: 120705 - DNA, 25 bp, Homo sapien
gggaactctctttacttcctccttg

SEQ ID NO: 120706 - DNA, 25 bp, Homo sapien
gggaactctcttaacttcctccttg

SEQ ID NO: 120707 - DNA, 25 bp, Homo sapien
tggtaaagcatcttctaccaccgaa

SEQ ID NO: 120708 - DNA, 25 bp, Homo sapien
tggtaaagcatcatctaccaccgaa

SEQ ID NO: 120709 - DNA, 25 bp, Homo sapien
ggggtacacccctgtttcacagtca

SEQ ID NO: 120710 - DNA, 25 bp, Homo sapien
ggggtacaccccagtttcacagtca

SEQ ID NO: 120711 - DNA, 25 bp, Homo sapien
agaagtgctgagtgtcgcgactcac

SEQ ID NO: 120712 - DNA, 25 bp, Homo sapien
agaagtgctgagagtcgcgactcac

SEQ ID NO: 120713 - DNA, 25 bp, Homo sapien
gaagtagacgccacaggtccatcta

SEQ ID NO: 120714 - DNA, 25 bp, Homo sapien
gaagtagacgcctcaggtccatcta

SEQ ID NO: 120715 - DNA, 25 bp, Homo sapien
gtcaccgttccttcgggtatccatg

SEQ ID NO: 120716 - DNA, 25 bp, Homo sapien
gtcaccgttcctacgggtatccatg

SEQ ID NO: 120717 - DNA, 25 bp, Homo sapien
accgtctctgactccgggttcggtg

SEQ ID NO: 120718 - DNA, 25 bp, Homo sapien
accgtctctgacaccgggttcggtg

SEQ ID NO: 120719 - DNA, 25 bp, Homo sapien
cgtccgtgcaccggcgaggttgagt

SEQ ID NO: 120720 - DNA, 25 bp, Homo sapien
cgtccgtgcacccgcgaggttgagt

SEQ ID NO: 120721 - DNA, 25 bp, Homo sapien
ggatctgagacaacctgtggttcag

SEQ ID NO: 120722 - DNA, 25 bp, Homo sapien
ggatctgagacatcctgtggttcag

SEQ ID NO: 120723 - DNA, 25 bp, Homo sapien
ggtggacgtcactgctcgaattatt

SEQ ID NO: 120724 - DNA, 25 bp, Homo sapien
ggtggacgtcacagctcgaattatt

SEQ ID NO: 120725 - DNA, 25 bp, Homo sapien
cacggacgtcataacttaagtccct

SEQ ID NO: 120726 - DNA, 25 bp, Homo sapien
cacggacgtcattacttaagtccct

SEQ ID NO: 120727 - DNA, 25 bp, Homo sapien
gactagaatcagtttagtttacaac

SEQ ID NO: 120728 - DNA, 25 bp, Homo sapien
gactagaatcagattagtttacaac

SEQ ID NO: 120729 - DNA, 25 bp, Homo sapien
tacatgtagaaagtacgtttacaca

SEQ ID NO: 120730 - DNA, 25 bp, Homo sapien
tacatgtagaaactacgtttacaca

SEQ ID NO: 120731 - DNA, 25 bp, Homo sapien
ccctcactttgaggtctcgttttcc

SEQ ID NO: 120732 - DNA, 25 bp, Homo sapien
ccctcactttgacgtctcgttttcc

SEQ ID NO: 120733 - DNA, 25 bp, Homo sapien
cggctacatgaagtaccgatccgcc

SEQ ID NO: 120734 - DNA, 25 bp, Homo sapien
cggctacatgaactaccgatccgcc

SEQ ID NO: 120735 - DNA, 25 bp, Homo sapien
tacggaaggagatccaggaagtcca

SEQ ID NO: 120736 - DNA, 25 bp, Homo sapien
tacggaaggagaaccaggaagtcca

SEQ ID NO: 120737 - DNA, 25 bp, Homo sapien
ccgagcggaaaaagaggcccacgag

SEQ ID NO: 120738 - DNA, 25 bp, Homo sapien
ccgagcggaaaatgaggcccacgag

SEQ ID NO: 120739 - DNA, 25 bp, Homo sapien
acatactggatataggaccccacgg

SEQ ID NO: 120740 - DNA, 25 bp, Homo sapien
acatactggataaaggaccccacgg

SEQ ID NO: 120741 - DNA, 25 bp, Homo sapien
gacactatatgacaatgaccatttg

SEQ ID NO: 120742 - DNA, 25 bp, Homo sapien
gacactatatgagaatgaccatttg

SEQ ID NO: 120743 - DNA, 25 bp, Homo sapien
aactcaaaagtgaatgtccattgtg

SEQ ID NO: 120744 - DNA, 25 bp, Homo sapien
aactcaaaagtgtatgtccattgtg

SEQ ID NO: 120745 - DNA, 25 bp, Homo sapien
actaccgtaaatagggtaccaaatt

SEQ ID NO: 120746 - DNA, 25 bp, Homo sapien
actaccgtaaattgggtaccaaatt

SEQ ID NO: 120747 - DNA, 25 bp, Homo sapien
tgaacatctgttcacggaacactac

SEQ ID NO: 120748 - DNA, 25 bp, Homo sapien
tgaacatctgttgacggaacactac

SEQ ID NO: 120749 - DNA, 25 bp, Homo sapien
gcggtcccgggaacgacgggaccga

SEQ ID NO: 120750 - DNA, 25 bp, Homo sapien
gcggtcccgggatcgacgggaccga

SEQ ID NO: 120751 - DNA, 25 bp, Homo sapien
gggccctccgtacgataacgccgat

SEQ ID NO: 120752 - DNA, 25 bp, Homo sapien
gggccctccgtaggataacgccgat

SEQ ID NO: 120753 - DNA, 25 bp, Homo sapien
aggggtcctgggtacgactactgta

SEQ ID NO: 120754 - DNA, 25 bp, Homo sapien
aggggtcctgggaacgactactgta

SEQ ID NO: 120755 - DNA, 25 bp, Homo sapien
aaggagtccatgagcgtacccgtac

SEQ ID NO: 120756 - DNA, 25 bp, Homo sapien
aaggagtccatgtgcgtacccgtac

SEQ ID NO: 120757 - DNA, 25 bp, Homo sapien
cgatcgactcaaagtcaatcaagta

SEQ ID NO: 120758 - DNA, 25 bp, Homo sapien
cgatcgactcaatgtcaatcaagta

SEQ ID NO: 120759 - DNA, 25 bp, Homo sapien
cacgagtggtcctttgtttaaagta

SEQ ID NO: 120760 - DNA, 25 bp, Homo sapien
cacgagtggtccattgtttaaagta

SEQ ID NO: 120761 - DNA, 25 bp, Homo sapien
caatatgtgtctgctatgtttgctc

SEQ ID NO: 120762 - DNA, 25 bp, Homo sapien
caatatgtgtctcctatgtttgctc

SEQ ID NO: 120763 - DNA, 25 bp, Homo sapien
taagacgttacctctgaatgtgcac

SEQ ID NO: 120764 - DNA, 25 bp, Homo sapien
taagacgttaccactgaatgtgcac

SEQ ID NO: 120765 - DNA, 25 bp, Homo sapien
cgtaagaatcctttgtagattgaca

SEQ ID NO: 120766 - DNA, 25 bp, Homo sapien
cgtaagaatcctatgtagattgaca

SEQ ID NO: 120767 - DNA, 25 bp, Homo sapien
aagtagacaaccactgactctttac

SEQ ID NO: 120768 - DNA, 25 bp, Homo sapien
aagtagacaacctctgactctttac

SEQ ID NO: 120769 - DNA, 25 bp, Homo sapien
agtgcatcggacttgttacattact

SEQ ID NO: 120770 - DNA, 25 bp, Homo sapien
agtgcatcggacatgttacattact

SEQ ID NO: 120771 - DNA, 25 bp, Homo sapien
gtatcatcgtgtcactttctttacg

SEQ ID NO: 120772 - DNA, 25 bp, Homo sapien
gtatcatcgtgtgactttctttacg

SEQ ID NO: 120773 - DNA, 25 bp, Homo sapien
gttacgtatattcacgccagtttct

SEQ ID NO: 120774 - DNA, 25 bp, Homo sapien
gttacgtatattgacgccagtttct

SEQ ID NO: 120775 - DNA, 25 bp, Homo sapien
gtcatgttcatactcgacggaacgt

SEQ ID NO: 120776 - DNA, 25 bp, Homo sapien
gtcatgttcatagtcgacggaacgt

SEQ ID NO: 120777 - DNA, 25 bp, Homo sapien
tctgactccactttcgtctgtgagt

SEQ ID NO: 120778 - DNA, 25 bp, Homo sapien
tctgactccactatcgtctgtgagt

SEQ ID NO: 120779 - DNA, 25 bp, Homo sapien
aattgtaggtcgtccaccgtcgtga

SEQ ID NO: 120780 - DNA, 25 bp, Homo sapien
aattgtaggtcgaccaccgtcgtga

SEQ ID NO: 120781 - DNA, 25 bp, Homo sapien
acgaaatcaggaattctaggtcaat

SEQ ID NO: 120782 - DNA, 25 bp, Homo sapien
acgaaatcaggatttctaggtcaat

SEQ ID NO: 120783 - DNA, 25 bp, Homo sapien
cgaccaagagtattgggtcgtagat

SEQ ID NO: 120784 - DNA, 25 bp, Homo sapien
cgaccaagagtaatgggtcgtagat

SEQ ID NO: 120785 - DNA, 25 bp, Homo sapien
cgttgaacggaaacattttctaatt

SEQ ID NO: 120786 - DNA, 25 bp, Homo sapien
cgttgaacggaatcattttctaatt

SEQ ID NO: 120787 - DNA, 25 bp, Homo sapien
gagagactgaactatatttccttct

SEQ ID NO: 120788 - DNA, 25 bp, Homo sapien
gagagactgaacaatatttccttct

SEQ ID NO: 120789 - DNA, 25 bp, Homo sapien
tttttaaagacaactgatttcgtcg

SEQ ID NO: 120790 - DNA, 25 bp, Homo sapien
tttttaaagacatctgatttcgtcg

SEQ ID NO: 120791 - DNA, 25 bp, Homo sapien
agtttcaaccatgtcttaacgattg

SEQ ID NO: 120792 - DNA, 25 bp, Homo sapien
agtttcaaccatctcttaacgattg

SEQ ID NO: 120793 - DNA, 25 bp, Homo sapien
aagtccggacaccaccgtatcgtcg

SEQ ID NO: 120794 - DNA, 25 bp, Homo sapien
aagtccggacacgaccgtatcgtcg

SEQ ID NO: 120795 - DNA, 25 bp, Homo sapien
ttgaagacgggctaaccgtgacgag

SEQ ID NO: 120796 - DNA, 25 bp, Homo sapien
ttgaagacgggcaaaccgtgacgag

SEQ ID NO: 120797 - DNA, 25 bp, Homo sapien
tttagaaaggtcggatacactgctc

SEQ ID NO: 120798 - DNA, 25 bp, Homo sapien
tttagaaaggtccgatacactgctc

SEQ ID NO: 120799 - DNA, 25 bp, Homo sapien
aggtcttaaaggttccctaccattg

SEQ ID NO: 120800 - DNA, 25 bp, Homo sapien
aggtcttaaaggatccctaccattg

SEQ ID NO: 120801 - DNA, 25 bp, Homo sapien
tcaaactcgtcgtcattccagtctg

SEQ ID NO: 120802 - DNA, 25 bp, Homo sapien
tcaaactcgtcgacattccagtctg

SEQ ID NO: 120803 - DNA, 25 bp, Homo sapien
taataccgtagctctgtgacatcgg

SEQ ID NO: 120804 - DNA, 25 bp, Homo sapien
taataccgtagcactgtgacatcgg

SEQ ID NO: 120805 - DNA, 25 bp, Homo sapien
ttttcacgaccactgtcgactccgg

SEQ ID NO: 120806 - DNA, 25 bp, Homo sapien
ttttcacgaccagtgtcgactccgg

SEQ ID NO: 120807 - DNA, 25 bp, Homo sapien
tgtttcacgacccaaacacgttaca

SEQ ID NO: 120808 - DNA, 25 bp, Homo sapien
tgtttcacgaccgaaacacgttaca

SEQ ID NO: 120809 - DNA, 25 bp, Homo sapien
actctgacagtttaagtccccaacg

SEQ ID NO: 120810 - DNA, 25 bp, Homo sapien
actctgacagttaaagtccccaacg

SEQ ID NO: 120811 - DNA, 25 bp, Homo sapien
ttgtccatgtgcttctcgccgcgat

SEQ ID NO: 120812 - DNA, 25 bp, Homo sapien
ttgtccatgtgcatctcgccgcgat

SEQ ID NO: 120813 - DNA, 25 bp, Homo sapien
tagggtccaactgggtgccatcggt

SEQ ID NO: 120814 - DNA, 25 bp, Homo sapien
tagggtccaactcggtgccatcggt

SEQ ID NO: 120815 - DNA, 25 bp, Homo sapien
tttactggaaactagttcgagtccg

SEQ ID NO: 120816 - DNA, 25 bp, Homo sapien
tttactggaaacaagttcgagtccg

SEQ ID NO: 120817 - DNA, 25 bp, Homo sapien
tcgttgtcggacgggaagtcccagc

SEQ ID NO: 120818 - DNA, 25 bp, Homo sapien
tcgttgtcggaccggaagtcccagc

SEQ ID NO: 120819 - DNA, 25 bp, Homo sapien
ctcttcgtcgcagagataaaccaga

SEQ ID NO: 120820 - DNA, 25 bp, Homo sapien
ctcttcgtcgcacagataaaccaga

SEQ ID NO: 120821 - DNA, 25 bp, Homo sapien
ttactctgttataagaaacacccga

SEQ ID NO: 120822 - DNA, 25 bp, Homo sapien
ttactctgttattagaaacacccga

SEQ ID NO: 120823 - DNA, 25 bp, Homo sapien
cacatttcctgtcgaccaggtccgg

SEQ ID NO: 120824 - DNA, 25 bp, Homo sapien
cacatttcctgtggaccaggtccgg

SEQ ID NO: 120825 - DNA, 25 bp, Homo sapien
ctcacgggcagtggagtgcttccag

SEQ ID NO: 120826 - DNA, 25 bp, Homo sapien
ctcacgggcagtcgagtgcttccag

SEQ ID NO: 120827 - DNA, 25 bp, Homo sapien
gccgtgcacggttcggtccctcttg

SEQ ID NO: 120828 - DNA, 25 bp, Homo sapien
gccgtgcacggtacggtccctcttg

SEQ ID NO: 120829 - DNA, 25 bp, Homo sapien
ccgctacaacaggtggtccccgctg

SEQ ID NO: 120830 - DNA, 25 bp, Homo sapien
ccgctacaacagctggtccccgctg

SEQ ID NO: 120831 - DNA, 25 bp, Homo sapien
cgaccttgtcctctcatgggcgtca

SEQ ID NO: 120832 - DNA, 25 bp, Homo sapien
cgaccttgtcctgtcatgggcgtca

SEQ ID NO: 120833 - DNA, 25 bp, Homo sapien
gtctaggtctttcttattgaaacca

SEQ ID NO: 120834 - DNA, 25 bp, Homo sapien
gtctaggtctttgttattgaaacca

SEQ ID NO: 120835 - DNA, 25 bp, Homo sapien
tgggtcttttattgtccttacatga

SEQ ID NO: 120836 - DNA, 25 bp, Homo sapien
tgggtcttttatagtccttacatga

SEQ ID NO: 120837 - DNA, 25 bp, Homo sapien
gtttcctatgataacctatacctgg

SEQ ID NO: 120838 - DNA, 25 bp, Homo sapien
gtttcctatgattacctatacctgg

SEQ ID NO: 120839 - DNA, 25 bp, Homo sapien
tgacgtctctatgttcctatttggt

SEQ ID NO: 120840 - DNA, 25 bp, Homo sapien
tgacgtctctatcttcctatttggt

SEQ ID NO: 120841 - DNA, 25 bp, Homo sapien
gtactacctttttctatatggtgtt

SEQ ID NO: 120842 - DNA, 25 bp, Homo sapien
gtactaccttttactatatggtgtt

SEQ ID NO: 120843 - DNA, 25 bp, Homo sapien
tgcaaagtgttcataccggagtgtc

SEQ ID NO: 120844 - DNA, 25 bp, Homo sapien
tgcaaagtgttcttaccggagtgtc

SEQ ID NO: 120845 - DNA, 25 bp, Homo sapien
gacaccaccgtgtgtcacaggggcg

SEQ ID NO: 120846 - DNA, 25 bp, Homo sapien
gacaccaccgtgagtcacaggggcg

SEQ ID NO: 120847 - DNA, 25 bp, Homo sapien
agatctagaaggagcacaggtttcg

SEQ ID NO: 120848 - DNA, 25 bp, Homo sapien
agatctagaaggtgcacaggtttcg

SEQ ID NO: 120849 - DNA, 25 bp, Homo sapien
tcaagtccttcgggacgtcagttgt

SEQ ID NO: 120850 - DNA, 25 bp, Homo sapien
tcaagtccttcgcgacgtcagttgt

SEQ ID NO: 120851 - DNA, 25 bp, Homo sapien
gaatatcgtcactcggcacctgtgg

SEQ ID NO: 120852 - DNA, 25 bp, Homo sapien
gaatatcgtcacacggcacctgtgg

SEQ ID NO: 120853 - DNA, 25 bp, Homo sapien
ccgtcagtccgagtacttcgtcggt

SEQ ID NO: 120854 - DNA, 25 bp, Homo sapien
ccgtcagtccgactacttcgtcggt

SEQ ID NO: 120855 - DNA, 25 bp, Homo sapien
gccgtcgacgtcagccacgttatga

SEQ ID NO: 120856 - DNA, 25 bp, Homo sapien
gccgtcgacgtctgccacgttatga

SEQ ID NO: 120857 - DNA, 25 bp, Homo sapien
gagaagtcctcttgaagtcacttat

SEQ ID NO: 120858 - DNA, 25 bp, Homo sapien
gagaagtcctctagaagtcacttat

SEQ ID NO: 120859 - DNA, 25 bp, Homo sapien
tcgaatcatttaggtacgtcaagta

SEQ ID NO: 120860 - DNA, 25 bp, Homo sapien
tcgaatcatttacgtacgtcaagta

SEQ ID NO: 120861 - DNA, 25 bp, Homo sapien
gtgaccttaatgtctctcatacgtg

SEQ ID NO: 120862 - DNA, 25 bp, Homo sapien
gtgaccttaatgactctcatacgtg

SEQ ID NO: 120863 - DNA, 25 bp, Homo sapien
atccatgaatcgtgggatctttgag

SEQ ID NO: 120864 - DNA, 25 bp, Homo sapien
atccatgaatcgagggatctttgag

SEQ ID NO: 120865 - DNA, 25 bp, Homo sapien
atgacatgtgtagatatacttcgca

SEQ ID NO: 120866 - DNA, 25 bp, Homo sapien
atgacatgtgtacatatacttcgca

SEQ ID NO: 120867 - DNA, 25 bp, Homo sapien
tcccagacaacctcgaacgaatgga

SEQ ID NO: 120868 - DNA, 25 bp, Homo sapien
tcccagacaaccacgaacgaatgga

SEQ ID NO: 120869 - DNA, 25 bp, Homo sapien
gcgttaccggcaccacaacgagtcg

SEQ ID NO: 120870 - DNA, 25 bp, Homo sapien
gcgttaccggcagcacaacgagtcg

SEQ ID NO: 120871 - DNA, 25 bp, Homo sapien
ggaaatgtttgactccacttatagc

SEQ ID NO: 120872 - DNA, 25 bp, Homo sapien
ggaaatgtttgagtccacttatagc

SEQ ID NO: 120873 - DNA, 25 bp, Homo sapien
gtagattcgttcgacttcccttttc

SEQ ID NO: 120874 - DNA, 25 bp, Homo sapien
gtagattcgttccacttcccttttc

SEQ ID NO: 120875 - DNA, 25 bp, Homo sapien
agagattcggttcatttccatttct

SEQ ID NO: 120876 - DNA, 25 bp, Homo sapien
agagattcggttgatttccatttct

SEQ ID NO: 120877 - DNA, 25 bp, Homo sapien
aaccgggattttaatccacttaagt

SEQ ID NO: 120878 - DNA, 25 bp, Homo sapien
aaccgggatttttatccacttaagt

SEQ ID NO: 120879 - DNA, 25 bp, Homo sapien
ggtgactatggtgtcgtctcttaag

SEQ ID NO: 120880 - DNA, 25 bp, Homo sapien
ggtgactatggtctcgtctcttaag

SEQ ID NO: 120881 - DNA, 25 bp, Homo sapien
gtttagattacgttctcgttttcga

SEQ ID NO: 120882 - DNA, 25 bp, Homo sapien
gtttagattacgatctcgttttcga

SEQ ID NO: 120883 - DNA, 25 bp, Homo sapien
ctcacgaaagtcgacctgtcatcta

SEQ ID NO: 120884 - DNA, 25 bp, Homo sapien
ctcacgaaagtccacctgtcatcta

SEQ ID NO: 120885 - DNA, 25 bp, Homo sapien
ctctagtagaaaacccaattaggta

SEQ ID NO: 120886 - DNA, 25 bp, Homo sapien
ctctagtagaaatcccaattaggta

SEQ ID NO: 120887 - DNA, 25 bp, Homo sapien
ccgtgtcccctgacagtatgtggta

SEQ ID NO: 120888 - DNA, 25 bp, Homo sapien
ccgtgtcccctgtcagtatgtggta

SEQ ID NO: 120889 - DNA, 25 bp, Homo sapien
cgtaaaatcgtttcggtaaagtttc

SEQ ID NO: 120890 - DNA, 25 bp, Homo sapien
cgtaaaatcgttacggtaaagtttc

SEQ ID NO: 120891 - DNA, 25 bp, Homo sapien
aaaaagatcatgggtgagagtcccg

SEQ ID NO: 120892 - DNA, 25 bp, Homo sapien
aaaaagatcatgcgtgagagtcccg

SEQ ID NO: 120893 - DNA, 25 bp, Homo sapien
cgaaagaccggacaccgaaagaccc

SEQ ID NO: 120894 - DNA, 25 bp, Homo sapien
cgaaagaccggagaccgaaagaccc

SEQ ID NO: 120895 - DNA, 25 bp, Homo sapien
ggtaaagacatgttcctgggagcca

SEQ ID NO: 120896 - DNA, 25 bp, Homo sapien
ggtaaagacatgatcctgggagcca

SEQ ID NO: 120897 - DNA, 25 bp, Homo sapien
gagaggaaggatcctctggacccga

SEQ ID NO: 120898 - DNA, 25 bp, Homo sapien
gagaggaaggatgctctggacccga

SEQ ID NO: 120899 - DNA, 25 bp, Homo sapien
gtacggggtcaggacctgggcccat

SEQ ID NO: 120900 - DNA, 25 bp, Homo sapien
gtacggggtcagcacctgggcccat

SEQ ID NO: 120901 - DNA, 25 bp, Homo sapien
accgtgtctaaggtcctgtggggcc

SEQ ID NO: 120902 - DNA, 25 bp, Homo sapien
accgtgtctaagctcctgtggggcc

SEQ ID NO: 120903 - DNA, 25 bp, Homo sapien
ctgggaagcacctggcgcgacagac

SEQ ID NO: 120904 - DNA, 25 bp, Homo sapien
ctgggaagcaccaggcgcgacagac

SEQ ID NO: 120905 - DNA, 25 bp, Homo sapien
gcgagcgaaacacaagccccgatcg

SEQ ID NO: 120906 - DNA, 25 bp, Homo sapien
gcgagcgaaacagaagccccgatcg

SEQ ID NO: 120907 - DNA, 25 bp, Homo sapien
ggcggaaacaggaagaaccgcggtc

SEQ ID NO: 120908 - DNA, 25 bp, Homo sapien
ggcggaaacaggtagaaccgcggtc

SEQ ID NO: 120909 - DNA, 25 bp, Homo sapien
gacgaaacagtaaccaaaggaactt

SEQ ID NO: 120910 - DNA, 25 bp, Homo sapien
gacgaaacagtatccaaaggaactt

SEQ ID NO: 120911 - DNA, 25 bp, Homo sapien
gaaagctgttacagtaacaaattct

SEQ ID NO: 120912 - DNA, 25 bp, Homo sapien
gaaagctgttactgtaacaaattct

SEQ ID NO: 120913 - DNA, 25 bp, Homo sapien
agataaattatttgtgttttgtact

SEQ ID NO: 120914 - DNA, 25 bp, Homo sapien
agataaattattagtgttttgtact

SEQ ID NO: 120915 - DNA, 25 bp, Homo sapien
agatatcattctatatgtttgtcta

SEQ ID NO: 120916 - DNA, 25 bp, Homo sapien
agatatcattctttatgtttgtcta

SEQ ID NO: 120917 - DNA, 25 bp, Homo sapien
attcatgtacgttttgatcgtctaa

SEQ ID NO: 120918 - DNA, 25 bp, Homo sapien
attcatgtacgtattgatcgtctaa

SEQ ID NO: 120919 - DNA, 25 bp, Homo sapien
tcgtgtcaccgttataaagttcata

SEQ ID NO: 120920 - DNA, 25 bp, Homo sapien
tcgtgtcaccgtaataaagttcata

SEQ ID NO: 120921 - DNA, 25 bp, Homo sapien
atgtctggtcatcactgtccgtgtg

SEQ ID NO: 120922 - DNA, 25 bp, Homo sapien
atgtctggtcatgactgtccgtgtg

SEQ ID NO: 120923 - DNA, 25 bp, Homo sapien
tatgtcatcaatccttatacgtagg

SEQ ID NO: 120924 - DNA, 25 bp, Homo sapien
tatgtcatcaatgcttatacgtagg

SEQ ID NO: 120925 - DNA, 25 bp, Homo sapien
actattttcataacacgtaaccggg

SEQ ID NO: 120926 - DNA, 25 bp, Homo sapien
actattttcatatcacgtaaccggg

SEQ ID NO: 120927 - DNA, 25 bp, Homo sapien
gactaattttgactgtcacagaggg

SEQ ID NO: 120928 - DNA, 25 bp, Homo sapien
gactaattttgagtgtcacagaggg

SEQ ID NO: 120929 - DNA, 25 bp, Homo sapien
tatttgtcttgatgtccacgtgggt

SEQ ID NO: 120930 - DNA, 25 bp, Homo sapien
tatttgtcttgaagtccacgtgggt

SEQ ID NO: 120931 - DNA, 25 bp, Homo sapien
gacttttatgtgtacactccatgcc

SEQ ID NO: 120932 - DNA, 25 bp, Homo sapien
gacttttatgtgaacactccatgcc

SEQ ID NO: 120933 - DNA, 25 bp, Homo sapien
tgtatcgtcggtgaaccccaggtca

SEQ ID NO: 120934 - DNA, 25 bp, Homo sapien
tgtatcgtcggtcaaccccaggtca

SEQ ID NO: 120935 - DNA, 25 bp, Homo sapien
ggtgaggataacatactaaactcag

SEQ ID NO: 120936 - DNA, 25 bp, Homo sapien
ggtgaggataacttactaaactcag

SEQ ID NO: 120937 - DNA, 25 bp, Homo sapien
tcttcctcgtccaggtcacaagggt

SEQ ID NO: 120938 - DNA, 25 bp, Homo sapien
tcttcctcgtcctggtcacaagggt

SEQ ID NO: 120939 - DNA, 25 bp, Homo sapien
tgatacccgttcctcgtccctggtt

SEQ ID NO: 120940 - DNA, 25 bp, Homo sapien
tgatacccgttcgtcgtccctggtt

SEQ ID NO: 120941 - DNA, 25 bp, Homo sapien
tacacctgtcctttccgtccggtgt

SEQ ID NO: 120942 - DNA, 25 bp, Homo sapien
tacacctgtcctatccgtccggtgt

SEQ ID NO: 120943 - DNA, 25 bp, Homo sapien
cttcacgagttctctccgtcaggta

SEQ ID NO: 120944 - DNA, 25 bp, Homo sapien
cttcacgagttcactccgtcaggta

SEQ ID NO: 120945 - DNA, 25 bp, Homo sapien
gttgttcagtttatcgactacgaaa

SEQ ID NO: 120946 - DNA, 25 bp, Homo sapien
gttgttcagtttttcgactacgaaa

SEQ ID NO: 120947 - DNA, 25 bp, Homo sapien
gagttgtaggagttttatcaaccgt

SEQ ID NO: 120948 - DNA, 25 bp, Homo sapien
gagttgtaggagatttatcaaccgt

SEQ ID NO: 120949 - DNA, 25 bp, Homo sapien
gtaggacaagggtatacgttcccga

SEQ ID NO: 120950 - DNA, 25 bp, Homo sapien
gtaggacaagggaatacgttcccga

SEQ ID NO: 120951 - DNA, 25 bp, Homo sapien
gtacaagtcgactctttactccgta

SEQ ID NO: 120952 - DNA, 25 bp, Homo sapien
gtacaagtcgacactttactccgta

SEQ ID NO: 120953 - DNA, 25 bp, Homo sapien
ggtgaggtcctacagtctatactgc

SEQ ID NO: 120954 - DNA, 25 bp, Homo sapien
ggtgaggtcctagagtctatactgc

SEQ ID NO: 120955 - DNA, 25 bp, Homo sapien
cgactgtgaaccaccggttgtcctg

SEQ ID NO: 120956 - DNA, 25 bp, Homo sapien
cgactgtgaacctccggttgtcctg

SEQ ID NO: 120957 - DNA, 25 bp, Homo sapien
tgccttggaggctaggttgtgtcac

SEQ ID NO: 120958 - DNA, 25 bp, Homo sapien
tgccttggaggcaaggttgtgtcac

SEQ ID NO: 120959 - DNA, 25 bp, Homo sapien
cccgtgtgggttaaaggttgtctcc

SEQ ID NO: 120960 - DNA, 25 bp, Homo sapien
cccgtgtgggtttaaggttgtctcc

SEQ ID NO: 120961 - DNA, 25 bp, Homo sapien
tcttagaggtaacgtgctcagagaa

SEQ ID NO: 120962 - DNA, 25 bp, Homo sapien
tcttagaggtaaggtgctcagagaa

SEQ ID NO: 120963 - DNA, 25 bp, Homo sapien
atgacgtatatacgttatttgacct

SEQ ID NO: 120964 - DNA, 25 bp, Homo sapien
atgacgtatataggttatttgacct

SEQ ID NO: 120965 - DNA, 25 bp, Homo sapien
tgaaacgaaatggttatctgtaaca

SEQ ID NO: 120966 - DNA, 25 bp, Homo sapien
tgaaacgaaatgcttatctgtaaca

SEQ ID NO: 120967 - DNA, 25 bp, Homo sapien
gtgaatcacaaacaagttactcaga

SEQ ID NO: 120968 - DNA, 25 bp, Homo sapien
gtgaatcacaaagaagttactcaga

SEQ ID NO: 120969 - DNA, 25 bp, Homo sapien
aaacacacagacgaccgccgtgtca

SEQ ID NO: 120970 - DNA, 25 bp, Homo sapien
aaacacacagaccaccgccgtgtca

SEQ ID NO: 120971 - DNA, 25 bp, Homo sapien
ataactaaaggcaaccaacgtcaga

SEQ ID NO: 120972 - DNA, 25 bp, Homo sapien
ataactaaaggctaccaacgtcaga

SEQ ID NO: 120973 - DNA, 25 bp, Homo sapien
actagcatcgactccatacacgaag

SEQ ID NO: 120974 - DNA, 25 bp, Homo sapien
actagcatcgacaccatacacgaag

SEQ ID NO: 120975 - DNA, 25 bp, Homo sapien
aggtatagacttgtcccataaactg

SEQ ID NO: 120976 - DNA, 25 bp, Homo sapien
aggtatagacttctcccataaactg

SEQ ID NO: 120977 - DNA, 25 bp, Homo sapien
gaaacaagttccacaaataacgtag

SEQ ID NO: 120978 - DNA, 25 bp, Homo sapien
gaaacaagttcctcaaataacgtag

SEQ ID NO: 120979 - DNA, 25 bp, Homo sapien
agaagacatccctatcgatagcatg

SEQ ID NO: 120980 - DNA, 25 bp, Homo sapien
agaagacatcccaatcgatagcatg

SEQ ID NO: 120981 - DNA, 25 bp, Homo sapien
ctactactgacgacaatgctttgtg

SEQ ID NO: 120982 - DNA, 25 bp, Homo sapien
ctactactgacgtcaatgctttgtg

SEQ ID NO: 120983 - DNA, 25 bp, Homo sapien
taatctcgggacatcttactgtcgg

SEQ ID NO: 120984 - DNA, 25 bp, Homo sapien
taatctcgggacttcttactgtcgg

SEQ ID NO: 120985 - DNA, 25 bp, Homo sapien
gtagaacgtcatgttccacttcggt

SEQ ID NO: 120986 - DNA, 25 bp, Homo sapien
gtagaacgtcatcttccacttcggt

SEQ ID NO: 120987 - DNA, 25 bp, Homo sapien
tgtagcccatcatgtcgatattaat

SEQ ID NO: 120988 - DNA, 25 bp, Homo sapien
tgtagcccatcaagtcgatattaat

SEQ ID NO: 120989 - DNA, 25 bp, Homo sapien
tggttacagaacagctactgaaagt

SEQ ID NO: 120990 - DNA, 25 bp, Homo sapien
tggttacagaactgctactgaaagt

SEQ ID NO: 120991 - DNA, 25 bp, Homo sapien
aggttacgtcgtccattactcaaag

SEQ ID NO: 120992 - DNA, 25 bp, Homo sapien
aggttacgtcgtgcattactcaaag

SEQ ID NO: 120993 - DNA, 25 bp, Homo sapien
gggtacgtaccattggcgacttact

SEQ ID NO: 120994 - DNA, 25 bp, Homo sapien
gggtacgtaccaatggcgacttact

SEQ ID NO: 120995 - DNA, 25 bp, Homo sapien
agagacagatccagtcgtggattgt

SEQ ID NO: 120996 - DNA, 25 bp, Homo sapien
agagacagatcctgtcgtggattgt

SEQ ID NO: 120997 - DNA, 25 bp, Homo sapien
aaggtatacatgtacgaggacaccc

SEQ ID NO: 120998 - DNA, 25 bp, Homo sapien
aaggtatacatgaacgaggacaccc

SEQ ID NO: 120999 - DNA, 25 bp, Homo sapien
gaggtctcctcagaggtagtgtcac

SEQ ID NO: 121000 - DNA, 25 bp, Homo sapien
gaggtctcctcacaggtagtgtcac

SEQ ID NO: 121001 - DNA, 25 bp, Homo sapien
gactgtatcgcaatcattggtacga

SEQ ID NO: 121002 - DNA, 25 bp, Homo sapien
gactgtatcgcattcattggtacga

SEQ ID NO: 121003 - DNA, 25 bp, Homo sapien
cccttattgacatccgtaaggacct

SEQ ID NO: 121004 - DNA, 25 bp, Homo sapien
cccttattgacaaccgtaaggacct

SEQ ID NO: 121005 - DNA, 25 bp, Homo sapien
cctccgatgtgaaaccgacatctca

SEQ ID NO: 121006 - DNA, 25 bp, Homo sapien
cctccgatgtgataccgacatctca

SEQ ID NO: 121007 - DNA, 25 bp, Homo sapien
acgaggagtttgaaccactagagga

SEQ ID NO: 121008 - DNA, 25 bp, Homo sapien
acgaggagtttgtaccactagagga

SEQ ID NO: 121009 - DNA, 25 bp, Homo sapien
ggagactcttgaacgggtcacggtc

SEQ ID NO: 121010 - DNA, 25 bp, Homo sapien
ggagactcttgatcgggtcacggtc

SEQ ID NO: 121011 - DNA, 25 bp, Homo sapien
ggatgttgtatactaagtgtccatc

SEQ ID NO: 121012 - DNA, 25 bp, Homo sapien
ggatgttgtatagtaagtgtccatc

SEQ ID NO: 121013 - DNA, 25 bp, Homo sapien
cagtgtgtagtcaaataactctttt

SEQ ID NO: 121014 - DNA, 25 bp, Homo sapien
cagtgtgtagtctaataactctttt

SEQ ID NO: 121015 - DNA, 25 bp, Homo sapien
tcgtcgtgcagcaaaaccttcgttc

SEQ ID NO: 121016 - DNA, 25 bp, Homo sapien
tcgtcgtgcagctaaaccttcgttc

SEQ ID NO: 121017 - DNA, 25 bp, Homo sapien
ggtgtcacccaagtctcttactcct

SEQ ID NO: 121018 - DNA, 25 bp, Homo sapien
ggtgtcacccaactctcttactcct

SEQ ID NO: 121019 - DNA, 25 bp, Homo sapien
aggggtcccttaaatgtttcacgtg

SEQ ID NO: 121020 - DNA, 25 bp, Homo sapien
aggggtcccttatatgtttcacgtg

SEQ ID NO: 121021 - DNA, 25 bp, Homo sapien
tccgtttgtctttttgccgtggtac

SEQ ID NO: 121022 - DNA, 25 bp, Homo sapien
tccgtttgtcttattgccgtggtac

SEQ ID NO: 121023 - DNA, 25 bp, Homo sapien
cgtgtatctcttgtttcgggacgag

SEQ ID NO: 121024 - DNA, 25 bp, Homo sapien
cgtgtatctcttctttcgggacgag

SEQ ID NO: 121025 - DNA, 25 bp, Homo sapien
tatatatactctctttcgatgtcgg

SEQ ID NO: 121026 - DNA, 25 bp, Homo sapien
tatatatactctgtttcgatgtcgg

SEQ ID NO: 121027 - DNA, 25 bp, Homo sapien
atttcacgtaagaacgtcgattatt

SEQ ID NO: 121028 - DNA, 25 bp, Homo sapien
atttcacgtaagtacgtcgattatt

SEQ ID NO: 121029 - DNA, 25 bp, Homo sapien
tcttctcgtgcatccgctactagta

SEQ ID NO: 121030 - DNA, 25 bp, Homo sapien
tcttctcgtgcaaccgctactagta

SEQ ID NO: 121031 - DNA, 25 bp, Homo sapien
tatgtgtcacgatacccccgtgtct

SEQ ID NO: 121032 - DNA, 25 bp, Homo sapien
tatgtgtcacgaaacccccgtgtct

SEQ ID NO: 121033 - DNA, 25 bp, Homo sapien
ctcttggagagaaaacgacactaca

SEQ ID NO: 121034 - DNA, 25 bp, Homo sapien
ctcttggagagataacgacactaca

SEQ ID NO: 121035 - DNA, 25 bp, Homo sapien
atacatggaacgagaacgtcctaac

SEQ ID NO: 121036 - DNA, 25 bp, Homo sapien
atacatggaacgtgaacgtcctaac

SEQ ID NO: 121037 - DNA, 25 bp, Homo sapien
cggtcacagagaggtggaagtcccc

SEQ ID NO: 121038 - DNA, 25 bp, Homo sapien
cggtcacagagacgtggaagtcccc

SEQ ID NO: 121039 - DNA, 25 bp, Homo sapien
cgcctaagacgatcgagaaaacccc

SEQ ID NO: 121040 - DNA, 25 bp, Homo sapien
cgcctaagacgaacgagaaaacccc

SEQ ID NO: 121041 - DNA, 25 bp, Homo sapien
tttcccgtagataaagaacccccga

SEQ ID NO: 121042 - DNA, 25 bp, Homo sapien
tttcccgtagattaagaacccccga

SEQ ID NO: 121043 - DNA, 25 bp, Homo sapien
cttctccggcgtcaggaactccaaa

SEQ ID NO: 121044 - DNA, 25 bp, Homo sapien
cttctccggcgtgaggaactccaaa

SEQ ID NO: 121045 - DNA, 25 bp, Homo sapien
cgttgtcggacgggaagtcccagcc

SEQ ID NO: 121046 - DNA, 25 bp, Homo sapien
cgttgtcggacgcgaagtcccagcc

SEQ ID NO: 121047 - DNA, 25 bp, Homo sapien
ataagtggataggatttccgatctc

SEQ ID NO: 121048 - DNA, 25 bp, Homo sapien
ataagtggatagcatttccgatctc

SEQ ID NO: 121049 - DNA, 25 bp, Homo sapien
tcgagaagaacgtcctccacgtaaa

SEQ ID NO: 121050 - DNA, 25 bp, Homo sapien
tcgagaagaacgacctccacgtaaa

SEQ ID NO: 121051 - DNA, 25 bp, Homo sapien
cggaagaaaattgtgacactaacga

SEQ ID NO: 121052 - DNA, 25 bp, Homo sapien
cggaagaaaattctgacactaacga

SEQ ID NO: 121053 - DNA, 25 bp, Homo sapien
tatacgaagaaatcccactgtgtca

SEQ ID NO: 121054 - DNA, 25 bp, Homo sapien
tatacgaagaaaacccactgtgtca

SEQ ID NO: 121055 - DNA, 25 bp, Homo sapien
agtaggagaagaccagatctcttga

SEQ ID NO: 121056 - DNA, 25 bp, Homo sapien
agtaggagaagagcagatctcttga

SEQ ID NO: 121057 - DNA, 25 bp, Homo sapien
acttaagagactacacattagttga

SEQ ID NO: 121058 - DNA, 25 bp, Homo sapien
acttaagagacttcacattagttga

SEQ ID NO: 121059 - DNA, 25 bp, Homo sapien
taccgtcacacttcacgttaaggga

SEQ ID NO: 121060 - DNA, 25 bp, Homo sapien
taccgtcacactacacgttaaggga

SEQ ID NO: 121061 - DNA, 25 bp, Homo sapien
tgagtctcctacacccttagggtcg

SEQ ID NO: 121062 - DNA, 25 bp, Homo sapien
tgagtctcctactcccttagggtcg

SEQ ID NO: 121063 - DNA, 25 bp, Homo sapien
gtcggtctgcacaccaagtccggtc

SEQ ID NO: 121064 - DNA, 25 bp, Homo sapien
gtcggtctgcactccaagtccggtc

SEQ ID NO: 121065 - DNA, 25 bp, Homo sapien
cctggggacccttctacgaaaggac

SEQ ID NO: 121066 - DNA, 25 bp, Homo sapien
cctggggaccctactacgaaaggac

SEQ ID NO: 121067 - DNA, 25 bp, Homo sapien
tgcgatcactccatacagatgggac

SEQ ID NO: 121068 - DNA, 25 bp, Homo sapien
tgcgatcactccttacagatgggac

SEQ ID NO: 121069 - DNA, 25 bp, Homo sapien
acttctcagggaccaaagacactgt

SEQ ID NO: 121070 - DNA, 25 bp, Homo sapien
acttctcagggagcaaagacactgt

SEQ ID NO: 121071 - DNA, 25 bp, Homo sapien
actgtggttatagaaaactacactt

SEQ ID NO: 121072 - DNA, 25 bp, Homo sapien
actgtggttatacaaaactacactt

SEQ ID NO: 121073 - DNA, 25 bp, Homo sapien
ttaattgggacctgaatatcttgac

SEQ ID NO: 121074 - DNA, 25 bp, Homo sapien
ttaattgggaccagaatatcttgac

SEQ ID NO: 121075 - DNA, 25 bp, Homo sapien
ggttttacgttgttcatcgtctata

SEQ ID NO: 121076 - DNA, 25 bp, Homo sapien
ggttttacgttgatcatcgtctata

SEQ ID NO: 121077 - DNA, 25 bp, Homo sapien
acggtgtcacttcgaccgattttat

SEQ ID NO: 121078 - DNA, 25 bp, Homo sapien
acggtgtcacttggaccgattttat

SEQ ID NO: 121079 - DNA, 25 bp, Homo sapien
tctccggtgacacttctctctcaag

SEQ ID NO: 121080 - DNA, 25 bp, Homo sapien
tctccggtgacagttctctctcaag

SEQ ID NO: 121081 - DNA, 25 bp, Homo sapien
gacgtcttatctttgactacgcaag

SEQ ID NO: 121082 - DNA, 25 bp, Homo sapien
gacgtcttatctatgactacgcaag

SEQ ID NO: 121083 - DNA, 25 bp, Homo sapien
gtccggtgtgtcttctctacggtaa

SEQ ID NO: 121084 - DNA, 25 bp, Homo sapien
gtccggtgtgtcatctctacggtaa

SEQ ID NO: 121085 - DNA, 25 bp, Homo sapien
cttaggacgtcgtactctttcccag

SEQ ID NO: 121086 - DNA, 25 bp, Homo sapien
cttaggacgtcgaactctttcccag

SEQ ID NO: 121087 - DNA, 25 bp, Homo sapien
agagtttttgggtctcttgtcccgg

SEQ ID NO: 121088 - DNA, 25 bp, Homo sapien
agagtttttgggactcttgtcccgg

SEQ ID NO: 121089 - DNA, 25 bp, Homo sapien
ttgtccttgggtaaatatctcataa

SEQ ID NO: 121090 - DNA, 25 bp, Homo sapien
ttgtccttgggttaatatctcataa

SEQ ID NO: 121091 - DNA, 25 bp, Homo sapien
ctggtttcgttataagactcagtaa

SEQ ID NO: 121092 - DNA, 25 bp, Homo sapien
ctggtttcgttaaaagactcagtaa

SEQ ID NO: 121093 - DNA, 25 bp, Homo sapien
gtgtatcctttcaaaaccggttact

SEQ ID NO: 121094 - DNA, 25 bp, Homo sapien
gtgtatcctttctaaaccggttact

SEQ ID NO: 121095 - DNA, 25 bp, Homo sapien
ctcttctcctgtcgttttcgggtcg

SEQ ID NO: 121096 - DNA, 25 bp, Homo sapien
ctcttctcctgtggttttcgggtcg

SEQ ID NO: 121097 - DNA, 25 bp, Homo sapien
atacttcttgcgtggtttcccggtg

SEQ ID NO: 121098 - DNA, 25 bp, Homo sapien
atacttcttgcgaggtttcccggtg

SEQ ID NO: 121099 - DNA, 25 bp, Homo sapien
acggttttgtgagtatctctcaagg

SEQ ID NO: 121100 - DNA, 25 bp, Homo sapien
acggttttgtgactatctctcaagg

SEQ ID NO: 121101 - DNA, 25 bp, Homo sapien
gtgttgacgagttaacttccaagat

SEQ ID NO: 121102 - DNA, 25 bp, Homo sapien
gtgttgacgagtaaacttccaagat

SEQ ID NO: 121103 - DNA, 25 bp, Homo sapien
tgattgtagaaatcactctcagtga

SEQ ID NO: 121104 - DNA, 25 bp, Homo sapien
tgattgtagaaaacactctcagtga

SEQ ID NO: 121105 - DNA, 25 bp, Homo sapien
acggttgttctaaattaccaatgga

SEQ ID NO: 121106 - DNA, 25 bp, Homo sapien
acggttgttctatattaccaatgga

SEQ ID NO: 121107 - DNA, 25 bp, Homo sapien
gtcattaaatagtctccagtgagta

SEQ ID NO: 121108 - DNA, 25 bp, Homo sapien
gtcattaaatagactccagtgagta

SEQ ID NO: 121109 - DNA, 25 bp, Homo sapien
tgacatgtcgagaggcgcaccggcc

SEQ ID NO: 121110 - DNA, 25 bp, Homo sapien
tgacatgtcgagtggcgcaccggcc

SEQ ID NO: 121111 - DNA, 25 bp, Homo sapien
tcactctcggtcgaaggttctttgg

SEQ ID NO: 121112 - DNA, 25 bp, Homo sapien
tcactctcggtccaaggttctttgg

SEQ ID NO: 121113 - DNA, 25 bp, Homo sapien
ctaacttgactctgttttcctttgg

SEQ ID NO: 121114 - DNA, 25 bp, Homo sapien
ctaacttgactcagttttcctttgg

SEQ ID NO: 121115 - DNA, 25 bp, Homo sapien
ctgaagaggattcactacgagtttg

SEQ ID NO: 121116 - DNA, 25 bp, Homo sapien
ctgaagaggattgactacgagtttg

SEQ ID NO: 121117 - DNA, 25 bp, Homo sapien
gtccgaggactacgacacattacag

SEQ ID NO: 121118 - DNA, 25 bp, Homo sapien
gtccgaggactaggacacattacag

SEQ ID NO: 121119 - DNA, 25 bp, Homo sapien
gtccgacacgacagtgactccttaa

SEQ ID NO: 121120 - DNA, 25 bp, Homo sapien
gtccgacacgactgtgactccttaa

SEQ ID NO: 121121 - DNA, 25 bp, Homo sapien
tgattacgtagatatacgaaccaaa

SEQ ID NO: 121122 - DNA, 25 bp, Homo sapien
tgattacgtagaaatacgaaccaaa

SEQ ID NO: 121123 - DNA, 25 bp, Homo sapien
tgttgagacatatgacatcacagta

SEQ ID NO: 121124 - DNA, 25 bp, Homo sapien
tgttgagacataagacatcacagta

SEQ ID NO: 121125 - DNA, 25 bp, Homo sapien
atatttccacttatacgtcaaacta

SEQ ID NO: 121126 - DNA, 25 bp, Homo sapien
atatttccacttttacgtcaaacta

SEQ ID NO: 121127 - DNA, 25 bp, Homo sapien
ataccgctatttgacgttaaacggt

SEQ ID NO: 121128 - DNA, 25 bp, Homo sapien
ataccgctatttcacgttaaacggt

SEQ ID NO: 121129 - DNA, 25 bp, Homo sapien
ttaaccctcgctttcgggtcaccgt

SEQ ID NO: 121130 - DNA, 25 bp, Homo sapien
ttaaccctcgctatcgggtcaccgt

SEQ ID NO: 121131 - DNA, 25 bp, Homo sapien
taaaccgtccataacggcgactcct

SEQ ID NO: 121132 - DNA, 25 bp, Homo sapien
taaaccgtccattacggcgactcct

SEQ ID NO: 121133 - DNA, 25 bp, Homo sapien
cgagagtccctttacgggtactaag

SEQ ID NO: 121134 - DNA, 25 bp, Homo sapien
cgagagtcccttaacgggtactaag

SEQ ID NO: 121135 - DNA, 25 bp, Homo sapien
ttcggtgtgcgcacctggactaggt

SEQ ID NO: 121136 - DNA, 25 bp, Homo sapien
ttcggtgtgcgctcctggactaggt

SEQ ID NO: 121137 - DNA, 25 bp, Homo sapien
ctgccgtggtccttccgaagggtag

SEQ ID NO: 121138 - DNA, 25 bp, Homo sapien
ctgccgtggtccatccgaagggtag

SEQ ID NO: 121139 - DNA, 25 bp, Homo sapien
tgtccatcgccaactcgtcgagggg

SEQ ID NO: 121140 - DNA, 25 bp, Homo sapien
tgtccatcgccatctcgtcgagggg

SEQ ID NO: 121141 - DNA, 25 bp, Homo sapien
gaccttcacgtcaacagtccgtaaa

SEQ ID NO: 121142 - DNA, 25 bp, Homo sapien
gaccttcacgtctacagtccgtaaa

SEQ ID NO: 121143 - DNA, 25 bp, Homo sapien
tataagtcacgaagggtctactgga

SEQ ID NO: 121144 - DNA, 25 bp, Homo sapien
tataagtcacgatgggtctactgga

SEQ ID NO: 121145 - DNA, 25 bp, Homo sapien
ggggacgccgtccagctccgtaact

SEQ ID NO: 121146 - DNA, 25 bp, Homo sapien
ggggacgccgtcgagctccgtaact

SEQ ID NO: 121147 - DNA, 25 bp, Homo sapien
aggtggagacgactaaactctcggc

SEQ ID NO: 121148 - DNA, 25 bp, Homo sapien
aggtggagacgagtaaactctcggc

SEQ ID NO: 121149 - DNA, 25 bp, Homo sapien
tggtccttgggacgtcacgatcccc

SEQ ID NO: 121150 - DNA, 25 bp, Homo sapien
tggtccttgggaggtcacgatcccc

SEQ ID NO: 121151 - DNA, 25 bp, Homo sapien
gtgtttttgatgacccattctacct

SEQ ID NO: 121152 - DNA, 25 bp, Homo sapien
gtgtttttgatgtcccattctacct

SEQ ID NO: 121153 - DNA, 25 bp, Homo sapien
ttttgtgtctatcctcggtgttacc

SEQ ID NO: 121154 - DNA, 25 bp, Homo sapien
ttttgtgtctatgctcggtgttacc

SEQ ID NO: 121155 - DNA, 25 bp, Homo sapien
gtctttgtgtcaagccccggtcacg

SEQ ID NO: 121156 - DNA, 25 bp, Homo sapien
gtctttgtgtcatgccccggtcacg

SEQ ID NO: 121157 - DNA, 25 bp, Homo sapien
gtttgtcgtgaacgtacctctcctc

SEQ ID NO: 121158 - DNA, 25 bp, Homo sapien
gtttgtcgtgaaggtacctctcctc

SEQ ID NO: 121159 - DNA, 25 bp, Homo sapien
tttgtctgtccgaccgagtcgacga

SEQ ID NO: 121160 - DNA, 25 bp, Homo sapien
tttgtctgtccgtccgagtcgacga

SEQ ID NO: 121161 - DNA, 25 bp, Homo sapien
gacaccatgtttctctccttccgag

SEQ ID NO: 121162 - DNA, 25 bp, Homo sapien
gacaccatgtttgtctccttccgag

SEQ ID NO: 121163 - DNA, 25 bp, Homo sapien
taccgaacctctttgtcacatttgg

SEQ ID NO: 121164 - DNA, 25 bp, Homo sapien
taccgaacctctatgtcacatttgg

SEQ ID NO: 121165 - DNA, 25 bp, Homo sapien
gtcaaaccttttgtaacgtattgta

SEQ ID NO: 121166 - DNA, 25 bp, Homo sapien
gtcaaaccttttctaacgtattgta

SEQ ID NO: 121167 - DNA, 25 bp, Homo sapien
aagacctttactcgaacgagtttag

SEQ ID NO: 121168 - DNA, 25 bp, Homo sapien
aagacctttactggaacgagtttag

SEQ ID NO: 121169 - DNA, 25 bp, Homo sapien
aaggtccttcttgtagtaacgtcaa

SEQ ID NO: 121170 - DNA, 25 bp, Homo sapien
aaggtccttcttctagtaacgtcaa

SEQ ID NO: 121171 - DNA, 25 bp, Homo sapien
tatcctaaccggtctacgaacgacc

SEQ ID NO: 121172 - DNA, 25 bp, Homo sapien
tatcctaaccggactacgaacgacc

SEQ ID NO: 121173 - DNA, 25 bp, Homo sapien
tcgagaactcggagtcttacctcgt

SEQ ID NO: 121174 - DNA, 25 bp, Homo sapien
tcgagaactcggtgtcttacctcgt

SEQ ID NO: 121175 - DNA, 25 bp, Homo sapien
gagtgtaccgaaggagggactcctc

SEQ ID NO: 121176 - DNA, 25 bp, Homo sapien
gagtgtaccgaacgagggactcctc

SEQ ID NO: 121177 - DNA, 25 bp, Homo sapien
ggtgtcgacacgtccggagctcctc

SEQ ID NO: 121178 - DNA, 25 bp, Homo sapien
ggtgtcgacacgaccggagctcctc

SEQ ID NO: 121179 - DNA, 25 bp, Homo sapien
gtttgcgtcatacgtgcgaggaacg

SEQ ID NO: 121180 - DNA, 25 bp, Homo sapien
gtttgcgtcataggtgcgaggaacg

SEQ ID NO: 121181 - DNA, 25 bp, Homo sapien
cggggatttatatcgtcctagggta

SEQ ID NO: 121182 - DNA, 25 bp, Homo sapien
cggggatttataacgtcctagggta

SEQ ID NO: 121183 - DNA, 25 bp, Homo sapien
gaggtagacctcttgtccgtccatc

SEQ ID NO: 121184 - DNA, 25 bp, Homo sapien
gaggtagacctcatgtccgtccatc

SEQ ID NO: 121185 - DNA, 25 bp, Homo sapien
ggactcacacggtcgtctcggcagg

SEQ ID NO: 121186 - DNA, 25 bp, Homo sapien
ggactcacacggacgtctcggcagg

SEQ ID NO: 121187 - DNA, 25 bp, Homo sapien
tttcgtacctgtcgtactcgagcaa

SEQ ID NO: 121188 - DNA, 25 bp, Homo sapien
tttcgtacctgtggtactcgagcaa

SEQ ID NO: 121189 - DNA, 25 bp, Homo sapien
ctatggtgtccacaggatcgaacag

SEQ ID NO: 121190 - DNA, 25 bp, Homo sapien
ctatggtgtccagaggatcgaacag

SEQ ID NO: 121191 - DNA, 25 bp, Homo sapien
tctattgtcccatttgatgacacgg

SEQ ID NO: 121192 - DNA, 25 bp, Homo sapien
tctattgtcccaattgatgacacgg

SEQ ID NO: 121193 - DNA, 25 bp, Homo sapien
atctgggacccgacgggcctaccgg

SEQ ID NO: 121194 - DNA, 25 bp, Homo sapien
atctgggacccgtcgggcctaccgg

SEQ ID NO: 121195 - DNA, 25 bp, Homo sapien
gtcctacgtttgtagacccgtagtc

SEQ ID NO: 121196 - DNA, 25 bp, Homo sapien
gtcctacgtttgaagacccgtagtc

SEQ ID NO: 121197 - DNA, 25 bp, Homo sapien
tcggagtgccgtcactacaccttcg

SEQ ID NO: 121198 - DNA, 25 bp, Homo sapien
tcggagtgccgtgactacaccttcg

SEQ ID NO: 121199 - DNA, 25 bp, Homo sapien
atgtgttgacgcggatcacgtgttt

SEQ ID NO: 121200 - DNA, 25 bp, Homo sapien
atgtgttgacgccgatcacgtgttt

SEQ ID NO: 121201 - DNA, 25 bp, Homo sapien
cgattgaagagtcgaccctctaggt

SEQ ID NO: 121202 - DNA, 25 bp, Homo sapien
cgattgaagagtggaccctctaggt

SEQ ID NO: 121203 - DNA, 25 bp, Homo sapien
ctcctcttggggactctctctacta

SEQ ID NO: 121204 - DNA, 25 bp, Homo sapien
ctcctcttggggtctctctctacta

SEQ ID NO: 121205 - DNA, 25 bp, Homo sapien
cctttagagagtttgtgtctttacg

SEQ ID NO: 121206 - DNA, 25 bp, Homo sapien
cctttagagagtatgtgtctttacg

SEQ ID NO: 121207 - DNA, 25 bp, Homo sapien
tgatcggatctttagtctctgtcgt

SEQ ID NO: 121208 - DNA, 25 bp, Homo sapien
tgatcggatcttaagtctctgtcgt

SEQ ID NO: 121209 - DNA, 25 bp, Homo sapien
cgctcgggcgtacacgacgtccgtc

SEQ ID NO: 121210 - DNA, 25 bp, Homo sapien
cgctcgggcgtagacgacgtccgtc

SEQ ID NO: 121211 - DNA, 25 bp, Homo sapien
gaccgatggtagatcgtgtcctcgt

SEQ ID NO: 121212 - DNA, 25 bp, Homo sapien
gaccgatggtagttcgtgtcctcgt

SEQ ID NO: 121213 - DNA, 25 bp, Homo sapien
ccttagcgggtgagttggtacgatt

SEQ ID NO: 121214 - DNA, 25 bp, Homo sapien
ccttagcgggtgtgttggtacgatt

SEQ ID NO: 121215 - DNA, 25 bp, Homo sapien
ctcaagtgtgtgtaatttacgatct

SEQ ID NO: 121216 - DNA, 25 bp, Homo sapien
ctcaagtgtgtgaaatttacgatct

SEQ ID NO: 121217 - DNA, 25 bp, Homo sapien
cacgtatcagcgacgaactagcgaa

SEQ ID NO: 121218 - DNA, 25 bp, Homo sapien
cacgtatcagcgtcgaactagcgaa

SEQ ID NO: 121219 - DNA, 25 bp, Homo sapien
caccggtgtcacaactgcgacgagt

SEQ ID NO: 121220 - DNA, 25 bp, Homo sapien
caccggtgtcactactgcgacgagt

SEQ ID NO: 121221 - DNA, 25 bp, Homo sapien
ccacaccaggcaagagtacacaact

SEQ ID NO: 121222 - DNA, 25 bp, Homo sapien
ccacaccaggcatgagtacacaact

SEQ ID NO: 121223 - DNA, 25 bp, Homo sapien
aacgaaccggacctgagtaaaacac

SEQ ID NO: 121224 - DNA, 25 bp, Homo sapien
aacgaaccggacgtgagtaaaacac

SEQ ID NO: 121225 - DNA, 25 bp, Homo sapien
taattcgtcgagagggagtcgaaac

SEQ ID NO: 121226 - DNA, 25 bp, Homo sapien
taattcgtcgagtgggagtcgaaac

SEQ ID NO: 121227 - DNA, 25 bp, Homo sapien
gacgcgtcagtaacggacacaagta

SEQ ID NO: 121228 - DNA, 25 bp, Homo sapien
gacgcgtcagtatcggacacaagta

SEQ ID NO: 121229 - DNA, 25 bp, Homo sapien
acctctcttatcactacggacgacg

SEQ ID NO: 121230 - DNA, 25 bp, Homo sapien
acctctcttatctctacggacgacg

SEQ ID NO: 121231 - DNA, 25 bp, Homo sapien
aggggacttctcaaatagcccagta

SEQ ID NO: 121232 - DNA, 25 bp, Homo sapien
aggggacttctctaatagcccagta

SEQ ID NO: 121233 - DNA, 25 bp, Homo sapien
gttgatgtaccaaatgtacaaggtt

SEQ ID NO: 121234 - DNA, 25 bp, Homo sapien
gttgatgtaccatatgtacaaggtt

SEQ ID NO: 121235 - DNA, 25 bp, Homo sapien
tgtcactgtccagtttacgaaaact

SEQ ID NO: 121236 - DNA, 25 bp, Homo sapien
tgtcactgtccactttacgaaaact

SEQ ID NO: 121237 - DNA, 25 bp, Homo sapien
ggtccgaggttggtctttcgtttca

SEQ ID NO: 121238 - DNA, 25 bp, Homo sapien
ggtccgaggttgctctttcgtttca

SEQ ID NO: 121239 - DNA, 25 bp, Homo sapien
tgtaccgaggatctccttcctcttg

SEQ ID NO: 121240 - DNA, 25 bp, Homo sapien
tgtaccgaggatgtccttcctcttg

SEQ ID NO: 121241 - DNA, 25 bp, Homo sapien
ctgtaggtggagctcttttcctttg

SEQ ID NO: 121242 - DNA, 25 bp, Homo sapien
ctgtaggtggaggtcttttcctttg

SEQ ID NO: 121243 - DNA, 25 bp, Homo sapien
cttatggtttctttctcaagtgtgg

SEQ ID NO: 121244 - DNA, 25 bp, Homo sapien
cttatggtttctatctcaagtgtgg

SEQ ID NO: 121245 - DNA, 25 bp, Homo sapien
cggactgcgtttctcacccatggcg

SEQ ID NO: 121246 - DNA, 25 bp, Homo sapien
cggactgcgtttgtcacccatggcg

SEQ ID NO: 121247 - DNA, 25 bp, Homo sapien
ggtccctgtccctcgggtgtcgtcg

SEQ ID NO: 121248 - DNA, 25 bp, Homo sapien
ggtccctgtcccacgggtgtcgtcg

SEQ ID NO: 121249 - DNA, 25 bp, Homo sapien
ctctccttcccaaacggtatgttcg

SEQ ID NO: 121250 - DNA, 25 bp, Homo sapien
ctctccttcccatacggtatgttcg

SEQ ID NO: 121251 - DNA, 25 bp, Homo sapien
tcttttccccgacatagtgttcgta

SEQ ID NO: 121252 - DNA, 25 bp, Homo sapien
tcttttccccgagatagtgttcgta

SEQ ID NO: 121253 - DNA, 25 bp, Homo sapien
ttacacgacactcaacaaggttcag

SEQ ID NO: 121254 - DNA, 25 bp, Homo sapien
ttacacgacactgaacaaggttcag

SEQ ID NO: 121255 - DNA, 25 bp, Homo sapien
tcttctacccagatctatggtcctg

SEQ ID NO: 121256 - DNA, 25 bp, Homo sapien
tcttctacccagttctatggtcctg

SEQ ID NO: 121257 - DNA, 25 bp, Homo sapien
tttcctttcgactgtcgggtctctg

SEQ ID NO: 121258 - DNA, 25 bp, Homo sapien
tttcctttcgacagtcgggtctctg

SEQ ID NO: 121259 - DNA, 25 bp, Homo sapien
ttttacagttgtttcgaatcttacg

SEQ ID NO: 121260 - DNA, 25 bp, Homo sapien
ttttacagttgtatcgaatcttacg

SEQ ID NO: 121261 - DNA, 25 bp, Homo sapien
gtcaagtaacgtcctctttttctgc

SEQ ID NO: 121262 - DNA, 25 bp, Homo sapien
gtcaagtaacgtgctctttttctgc

SEQ ID NO: 121263 - DNA, 25 bp, Homo sapien
agcaaacaatgttgatttcggtcgt

SEQ ID NO: 121264 - DNA, 25 bp, Homo sapien
agcaaacaatgtagatttcggtcgt

SEQ ID NO: 121265 - DNA, 25 bp, Homo sapien
taaacaagggctagaccgttatgtc

SEQ ID NO: 121266 - DNA, 25 bp, Homo sapien
taaacaagggcttgaccgttatgtc

SEQ ID NO: 121267 - DNA, 25 bp, Homo sapien
aaaaaccgtacttgtacctgatgtc

SEQ ID NO: 121268 - DNA, 25 bp, Homo sapien
aaaaaccgtactagtacctgatgtc

SEQ ID NO: 121269 - DNA, 25 bp, Homo sapien
gaaaaggggttcgacgattgaaccg

SEQ ID NO: 121270 - DNA, 25 bp, Homo sapien
gaaaaggggttccacgattgaaccg

SEQ ID NO: 121271 - DNA, 25 bp, Homo sapien
caagaggtttgtcaccttgtaatct

SEQ ID NO: 121272 - DNA, 25 bp, Homo sapien
caagaggtttgtgaccttgtaatct

SEQ ID NO: 121273 - DNA, 25 bp, Homo sapien
ataatctttgatgacaccgttgaca

SEQ ID NO: 121274 - DNA, 25 bp, Homo sapien
ataatctttgatcacaccgttgaca

SEQ ID NO: 121275 - DNA, 25 bp, Homo sapien
tccttttcaccttcacgtcgtgatg

SEQ ID NO: 121276 - DNA, 25 bp, Homo sapien
tccttttcacctacacgtcgtgatg

SEQ ID NO: 121277 - DNA, 25 bp, Homo sapien
ccgtcgtattccccctgacggtgtc

SEQ ID NO: 121278 - DNA, 25 bp, Homo sapien
ccgtcgtattccgcctgacggtgtc

SEQ ID NO: 121279 - DNA, 25 bp, Homo sapien
ggtgccgtttgtccagccaggggag

SEQ ID NO: 121280 - DNA, 25 bp, Homo sapien
ggtgccgtttgtgcagccaggggag

SEQ ID NO: 121281 - DNA, 25 bp, Homo sapien
caggagtgtctaacgcaggctcgat

SEQ ID NO: 121282 - DNA, 25 bp, Homo sapien
caggagtgtctatcgcaggctcgat

SEQ ID NO: 121283 - DNA, 25 bp, Homo sapien
gacaaaggactttataacactagtt

SEQ ID NO: 121284 - DNA, 25 bp, Homo sapien
gacaaaggacttaataacactagtt

SEQ ID NO: 121285 - DNA, 25 bp, Homo sapien
tacaaggttcttgtacgagattcgt

SEQ ID NO: 121286 - DNA, 25 bp, Homo sapien
tacaaggttcttctacgagattcgt

SEQ ID NO: 121287 - DNA, 25 bp, Homo sapien
aatcgttctcagttgtagttcttct

SEQ ID NO: 121288 - DNA, 25 bp, Homo sapien
aatcgttctcagatgtagttcttct

SEQ ID NO: 121289 - DNA, 25 bp, Homo sapien
actcacgtttgtggatagtcctatt

SEQ ID NO: 121290 - DNA, 25 bp, Homo sapien
actcacgtttgtcgatagtcctatt

SEQ ID NO: 121291 - DNA, 25 bp, Homo sapien
taactcaggtcgtcgatgtctcatt

SEQ ID NO: 121292 - DNA, 25 bp, Homo sapien
taactcaggtcgacgatgtctcatt

SEQ ID NO: 121293 - DNA, 25 bp, Homo sapien
tacgccagggacgactccgtcagtc

SEQ ID NO: 121294 - DNA, 25 bp, Homo sapien
tacgccagggaccactccgtcagtc

SEQ ID NO: 121295 - DNA, 25 bp, Homo sapien
tcggtcatcatacgtctccgatgtc

SEQ ID NO: 121296 - DNA, 25 bp, Homo sapien
tcggtcatcataggtctccgatgtc

SEQ ID NO: 121297 - DNA, 25 bp, Homo sapien
tcgcacctcatacttcggactgtat

SEQ ID NO: 121298 - DNA, 25 bp, Homo sapien
tcgcacctcatagttcggactgtat

SEQ ID NO: 121299 - DNA, 25 bp, Homo sapien
tgttcctctaccttagtttcgggtc

SEQ ID NO: 121300 - DNA, 25 bp, Homo sapien
tgttcctctaccatagtttcgggtc

SEQ ID NO: 121301 - DNA, 25 bp, Homo sapien
tatactgtcttaaatttggtcgtct

SEQ ID NO: 121302 - DNA, 25 bp, Homo sapien
tatactgtcttatatttggtcgtct

SEQ ID NO: 121303 - DNA, 25 bp, Homo sapien
ggactccgttctcttctgatactat

SEQ ID NO: 121304 - DNA, 25 bp, Homo sapien
ggactccgttctgttctgatactat

SEQ ID NO: 121305 - DNA, 25 bp, Homo sapien
ggtcgtgactctgttactcatctac

SEQ ID NO: 121306 - DNA, 25 bp, Homo sapien
ggtcgtgactctcttactcatctac

SEQ ID NO: 121307 - DNA, 25 bp, Homo sapien
ccggtcgaactatccctctctttag

SEQ ID NO: 121308 - DNA, 25 bp, Homo sapien
ccggtcgaactaaccctctctttag

SEQ ID NO: 121309 - DNA, 25 bp, Homo sapien
gaccccggggtcctgcctctggtga

SEQ ID NO: 121310 - DNA, 25 bp, Homo sapien
gaccccggggtcgtgcctctggtga

SEQ ID NO: 121311 - DNA, 25 bp, Homo sapien
acccagaccgtggaccctctggtga

SEQ ID NO: 121312 - DNA, 25 bp, Homo sapien
acccagaccgtgcaccctctggtga

SEQ ID NO: 121313 - DNA, 25 bp, Homo sapien
atatcgtccgacacttctcgctgac

SEQ ID NO: 121314 - DNA, 25 bp, Homo sapien
atatcgtccgactcttctcgctgac

SEQ ID NO: 121315 - DNA, 25 bp, Homo sapien
aattacgacaatgtctacgatgact

SEQ ID NO: 121316 - DNA, 25 bp, Homo sapien
aattacgacaatctctacgatgact

SEQ ID NO: 121317 - DNA, 25 bp, Homo sapien
gagttcgtcttctgctgaatacact

SEQ ID NO: 121318 - DNA, 25 bp, Homo sapien
gagttcgtcttcagctgaatacact

SEQ ID NO: 121319 - DNA, 25 bp, Homo sapien
cagttgtagtaagactgaactacat

SEQ ID NO: 121320 - DNA, 25 bp, Homo sapien
cagttgtagtaacactgaactacat

SEQ ID NO: 121321 - DNA, 25 bp, Homo sapien
cagattgtagtgacacgagacttat

SEQ ID NO: 121322 - DNA, 25 bp, Homo sapien
cagattgtagtgtcacgagacttat

SEQ ID NO: 121323 - DNA, 25 bp, Homo sapien
cagtagttgtctgtcgtcagttgtt

SEQ ID NO: 121324 - DNA, 25 bp, Homo sapien
cagtagttgtctctcgtcagttgtt

SEQ ID NO: 121325 - DNA, 25 bp, Homo sapien
cggagttgtgtttcctacggtgtat

SEQ ID NO: 121326 - DNA, 25 bp, Homo sapien
cggagttgtgttacctacggtgtat

SEQ ID NO: 121327 - DNA, 25 bp, Homo sapien
cgtcagctctgtcgtataccccagt

SEQ ID NO: 121328 - DNA, 25 bp, Homo sapien
cgtcagctctgtggtataccccagt

SEQ ID NO: 121329 - DNA, 25 bp, Homo sapien
acgttacctctggtaacactgaccc

SEQ ID NO: 121330 - DNA, 25 bp, Homo sapien
acgttacctctgctaacactgaccc

SEQ ID NO: 121331 - DNA, 25 bp, Homo sapien
cttatggcttggtgagtgcgacgac

SEQ ID NO: 121332 - DNA, 25 bp, Homo sapien
cttatggcttggagagtgcgacgac

SEQ ID NO: 121333 - DNA, 25 bp, Homo sapien
ttaaggtctaccacgcgagtcctga

SEQ ID NO: 121334 - DNA, 25 bp, Homo sapien
ttaaggtctacctcgcgagtcctga

SEQ ID NO: 121335 - DNA, 25 bp, Homo sapien
ctcgaacttatcaacggtcacatga

SEQ ID NO: 121336 - DNA, 25 bp, Homo sapien
ctcgaacttatctacggtcacatga

SEQ ID NO: 121337 - DNA, 25 bp, Homo sapien
gtttcaatcacagtcgtgatttcta

SEQ ID NO: 121338 - DNA, 25 bp, Homo sapien
gtttcaatcacactcgtgatttcta

SEQ ID NO: 121339 - DNA, 25 bp, Homo sapien
ttttcatgtcctctctcttaccttg

SEQ ID NO: 121340 - DNA, 25 bp, Homo sapien
ttttcatgtcctgtctcttaccttg

SEQ ID NO: 121341 - DNA, 25 bp, Homo sapien
tgtggtcctctctcttttccctctg

SEQ ID NO: 121342 - DNA, 25 bp, Homo sapien
tgtggtcctctcacttttccctctg

SEQ ID NO: 121343 - DNA, 25 bp, Homo sapien
ggcgtaaatacagtttacacccata

SEQ ID NO: 121344 - DNA, 25 bp, Homo sapien
ggcgtaaatacactttacacccata

SEQ ID NO: 121345 - DNA, 25 bp, Homo sapien
tgcggaaccccttgtgtcccagaca

SEQ ID NO: 121346 - DNA, 25 bp, Homo sapien
tgcggaacccctagtgtcccagaca

SEQ ID NO: 121347 - DNA, 25 bp, Homo sapien
ggagacccgactaggttccctcgac

SEQ ID NO: 121348 - DNA, 25 bp, Homo sapien
ggagacccgacttggttccctcgac

SEQ ID NO: 121349 - DNA, 25 bp, Homo sapien
gaggctcgcgttgagatccatcgtc

SEQ ID NO: 121350 - DNA, 25 bp, Homo sapien
gaggctcgcgttcagatccatcgtc

SEQ ID NO: 121351 - DNA, 25 bp, Homo sapien
gtaaggcgtccttggcttcaacgtc

SEQ ID NO: 121352 - DNA, 25 bp, Homo sapien
gtaaggcgtcctaggcttcaacgtc

SEQ ID NO: 121353 - DNA, 25 bp, Homo sapien
cacctcctgaaatcgggtctaggtc

SEQ ID NO: 121354 - DNA, 25 bp, Homo sapien
cacctcctgaaaacgggtctaggtc

SEQ ID NO: 121355 - DNA, 25 bp, Homo sapien
agcgtccggtcaccacgctggagga

SEQ ID NO: 121356 - DNA, 25 bp, Homo sapien
agcgtccggtcagcacgctggagga

SEQ ID NO: 121357 - DNA, 25 bp, Homo sapien
gtgttctaggactccggtcggttca

SEQ ID NO: 121358 - DNA, 25 bp, Homo sapien
gtgttctaggacaccggtcggttca

SEQ ID NO: 121359 - DNA, 25 bp, Homo sapien
ggtggagtcaccatgaattacgact

SEQ ID NO: 121360 - DNA, 25 bp, Homo sapien
ggtggagtcaccttgaattacgact

SEQ ID NO: 121361 - DNA, 25 bp, Homo sapien
tccggactcactttagaagttacct

SEQ ID NO: 121362 - DNA, 25 bp, Homo sapien
tccggactcactatagaagttacct

SEQ ID NO: 121363 - DNA, 25 bp, Homo sapien
gaagtaaccacaagtagtgtttacc

SEQ ID NO: 121364 - DNA, 25 bp, Homo sapien
gaagtaaccacatgtagtgtttacc

SEQ ID NO: 121365 - DNA, 25 bp, Homo sapien
taacagtgaaataacgttctaccat

SEQ ID NO: 121366 - DNA, 25 bp, Homo sapien
taacagtgaaattacgttctaccat

SEQ ID NO: 121367 - DNA, 25 bp, Homo sapien
taacttgagactcctcgtgtctccc

SEQ ID NO: 121368 - DNA, 25 bp, Homo sapien
taacttgagactgctcgtgtctccc

SEQ ID NO: 121369 - DNA, 25 bp, Homo sapien
tgtaccttggacgaccgtaaccctc

SEQ ID NO: 121370 - DNA, 25 bp, Homo sapien
tgtaccttggaccaccgtaaccctc

SEQ ID NO: 121371 - DNA, 25 bp, Homo sapien
agtgaatgggtcgactgagagacca

SEQ ID NO: 121372 - DNA, 25 bp, Homo sapien
agtgaatgggtccactgagagacca

SEQ ID NO: 121373 - DNA, 25 bp, Homo sapien
gagaaggaaaatagaggacccacag

SEQ ID NO: 121374 - DNA, 25 bp, Homo sapien
gagaaggaaaattgaggacccacag

SEQ ID NO: 121375 - DNA, 25 bp, Homo sapien
acaccaggtacttgaggaccccctg

SEQ ID NO: 121376 - DNA, 25 bp, Homo sapien
acaccaggtactagaggaccccctg

SEQ ID NO: 121377 - DNA, 25 bp, Homo sapien
aactacagaggacaaagaccttttg

SEQ ID NO: 121378 - DNA, 25 bp, Homo sapien
aactacagaggagaaagaccttttg

SEQ ID NO: 121379 - DNA, 25 bp, Homo sapien
acacaaaaatgaatgccagtctgag

SEQ ID NO: 121380 - DNA, 25 bp, Homo sapien
acacaaaaatgattgccagtctgag

SEQ ID NO: 121381 - DNA, 25 bp, Homo sapien
acaccaaatgttctgtctagaatgt

SEQ ID NO: 121382 - DNA, 25 bp, Homo sapien
acaccaaatgttgtgtctagaatgt

SEQ ID NO: 121383 - DNA, 25 bp, Homo sapien
acggaaatcttttacagacgacaac

SEQ ID NO: 121384 - DNA, 25 bp, Homo sapien
acggaaatctttaacagacgacaac

SEQ ID NO: 121385 - DNA, 25 bp, Homo sapien
cgggtccagggtaacacagacaaga

SEQ ID NO: 121386 - DNA, 25 bp, Homo sapien
cgggtccagggttacacagacaaga

SEQ ID NO: 121387 - DNA, 25 bp, Homo sapien
cggccgcccggttcataacgtgaat

SEQ ID NO: 121388 - DNA, 25 bp, Homo sapien
cggccgcccggtacataacgtgaat

SEQ ID NO: 121389 - DNA, 25 bp, Homo sapien
ttgggttcgggctacgtatactgta

SEQ ID NO: 121390 - DNA, 25 bp, Homo sapien
ttgggttcgggcaacgtatactgta

SEQ ID NO: 121391 - DNA, 25 bp, Homo sapien
aaggagtccctgaccgacatatacg

SEQ ID NO: 121392 - DNA, 25 bp, Homo sapien
aaggagtccctgtccgacatatacg

SEQ ID NO: 121393 - DNA, 25 bp, Homo sapien
gatcgaccatagaacacctacaaag

SEQ ID NO: 121394 - DNA, 25 bp, Homo sapien
gatcgaccatagtacacctacaaag

SEQ ID NO: 121395 - DNA, 25 bp, Homo sapien
cgagtgctcgcattccgttagaaga

SEQ ID NO: 121396 - DNA, 25 bp, Homo sapien
cgagtgctcgcaatccgttagaaga

SEQ ID NO: 121397 - DNA, 25 bp, Homo sapien
cacgatgtttctccatgtcttgtta

SEQ ID NO: 121398 - DNA, 25 bp, Homo sapien
cacgatgtttctgcatgtcttgtta

SEQ ID NO: 121399 - DNA, 25 bp, Homo sapien
acccgaggttccactgatttgcact

SEQ ID NO: 121400 - DNA, 25 bp, Homo sapien
acccgaggttcctctgatttgcact

SEQ ID NO: 121401 - DNA, 25 bp, Homo sapien
cgtaaagttcctttcgtgtttgaat

SEQ ID NO: 121402 - DNA, 25 bp, Homo sapien
cgtaaagttcctatcgtgtttgaat

SEQ ID NO: 121403 - DNA, 25 bp, Homo sapien
acacgtgaaactttctcgactttga

SEQ ID NO: 121404 - DNA, 25 bp, Homo sapien
acacgtgaaactatctcgactttga

SEQ ID NO: 121405 - DNA, 25 bp, Homo sapien
cagtgcactgtgtcttgtactttgt

SEQ ID NO: 121406 - DNA, 25 bp, Homo sapien
cagtgcactgtgacttgtactttgt

SEQ ID NO: 121407 - DNA, 25 bp, Homo sapien
gggtgtacatgttaccttctctttg

SEQ ID NO: 121408 - DNA, 25 bp, Homo sapien
gggtgtacatgtaaccttctctttg

SEQ ID NO: 121409 - DNA, 25 bp, Homo sapien
tgtcgtcgtattcaccccagtcttc

SEQ ID NO: 121410 - DNA, 25 bp, Homo sapien
tgtcgtcgtattgaccccagtcttc

SEQ ID NO: 121411 - DNA, 25 bp, Homo sapien
gtacaagttacatggtcacgtcaat

SEQ ID NO: 121412 - DNA, 25 bp, Homo sapien
gtacaagttacaaggtcacgtcaat

SEQ ID NO: 121413 - DNA, 25 bp, Homo sapien
tcggagtccctctgtctctctaact

SEQ ID NO: 121414 - DNA, 25 bp, Homo sapien
tcggagtccctcagtctctctaact

SEQ ID NO: 121415 - DNA, 25 bp, Homo sapien
tcggacgcgtcgaacctacctctga

SEQ ID NO: 121416 - DNA, 25 bp, Homo sapien
tcggacgcgtcgtacctacctctga

SEQ ID NO: 121417 - DNA, 25 bp, Homo sapien
aagaaaccaggagcttcagtgtgaa

SEQ ID NO: 121418 - DNA, 25 bp, Homo sapien
aagaaaccaggaccttcagtgtgaa

SEQ ID NO: 121419 - DNA, 25 bp, Homo sapien
cgaccagaacgagtaccggtacgga

SEQ ID NO: 121420 - DNA, 25 bp, Homo sapien
cgaccagaacgactaccggtacgga

SEQ ID NO: 121421 - DNA, 25 bp, Homo sapien
gagttcaccaaaacattttcaagtt

SEQ ID NO: 121422 - DNA, 25 bp, Homo sapien
gagttcaccaaatcattttcaagtt

SEQ ID NO: 121423 - DNA, 25 bp, Homo sapien
gagacgactgtacaaaattcatatt

SEQ ID NO: 121424 - DNA, 25 bp, Homo sapien
gagacgactgtagaaaattcatatt

SEQ ID NO: 121425 - DNA, 25 bp, Homo sapien
tttgttaaagacacggttctacttc

SEQ ID NO: 121426 - DNA, 25 bp, Homo sapien
tttgttaaagactcggttctacttc

SEQ ID NO: 121427 - DNA, 25 bp, Homo sapien
gtgagtctaaaacttcttaacattg

SEQ ID NO: 121428 - DNA, 25 bp, Homo sapien
gtgagtctaaaagttcttaacattg

SEQ ID NO: 121429 - DNA, 25 bp, Homo sapien
aagtcggagaactatcgtagtccgt

SEQ ID NO: 121430 - DNA, 25 bp, Homo sapien
aagtcggagaacaatcgtagtccgt

SEQ ID NO: 121431 - DNA, 25 bp, Homo sapien
tggaaaccggacctaatagtagccg

SEQ ID NO: 121432 - DNA, 25 bp, Homo sapien
tggaaaccggacgtaatagtagccg

SEQ ID NO: 121433 - DNA, 25 bp, Homo sapien
tattagaacaggtaaacatcgtctg

SEQ ID NO: 121434 - DNA, 25 bp, Homo sapien
tattagaacaggaaaacatcgtctg

SEQ ID NO: 121435 - DNA, 25 bp, Homo sapien
ggttagaaacagacaccaccagtcc

SEQ ID NO: 121436 - DNA, 25 bp, Homo sapien
ggttagaaacagtcaccaccagtcc

SEQ ID NO: 121437 - DNA, 25 bp, Homo sapien
ttaaatactggtgtctaccatgtcg

SEQ ID NO: 121438 - DNA, 25 bp, Homo sapien
ttaaatactggtctctaccatgtcg

SEQ ID NO: 121439 - DNA, 25 bp, Homo sapien
tacaactcgtgcatcttcccgtagg

SEQ ID NO: 121440 - DNA, 25 bp, Homo sapien
tacaactcgtgcttcttcccgtagg

SEQ ID NO: 121441 - DNA, 25 bp, Homo sapien
tctttctcctcacgtgtcatgaggt

SEQ ID NO: 121442 - DNA, 25 bp, Homo sapien
tctttctcctcaggtgtcatgaggt

SEQ ID NO: 121443 - DNA, 25 bp, Homo sapien
cattttcaacaccaaaagttacgat

SEQ ID NO: 121444 - DNA, 25 bp, Homo sapien
cattttcaacacgaaaagttacgat

SEQ ID NO: 121445 - DNA, 25 bp, Homo sapien
tctctgtcattacagtctccgagaa

SEQ ID NO: 121446 - DNA, 25 bp, Homo sapien
tctctgtcattagagtctccgagaa

SEQ ID NO: 121447 - DNA, 25 bp, Homo sapien
ttcgccatcatcaactaccgcgcga

SEQ ID NO: 121448 - DNA, 25 bp, Homo sapien
ttcgccatcatctactaccgcgcga

SEQ ID NO: 121449 - DNA, 25 bp, Homo sapien
tttgtccatactgaagacccatcgg

SEQ ID NO: 121450 - DNA, 25 bp, Homo sapien
tttgtccatactcaagacccatcgg

SEQ ID NO: 121451 - DNA, 25 bp, Homo sapien
ttgacaggaaataagtctcactctg

SEQ ID NO: 121452 - DNA, 25 bp, Homo sapien
ttgacaggaaattagtctcactctg

SEQ ID NO: 121453 - DNA, 25 bp, Homo sapien
tattgggactcgaaagtcctaccag

SEQ ID NO: 121454 - DNA, 25 bp, Homo sapien
tattgggactcgtaagtcctaccag

SEQ ID NO: 121455 - DNA, 25 bp, Homo sapien
tttgtgtccacttagaacgaaccaa

SEQ ID NO: 121456 - DNA, 25 bp, Homo sapien
tttgtgtccactaagaacgaaccaa

SEQ ID NO: 121457 - DNA, 25 bp, Homo sapien
tttccgttctaaagaacgaagtcca

SEQ ID NO: 121458 - DNA, 25 bp, Homo sapien
tttccgttctaatgaacgaagtcca

SEQ ID NO: 121459 - DNA, 25 bp, Homo sapien
tacatcttccttaccacaggaacgg

SEQ ID NO: 121460 - DNA, 25 bp, Homo sapien
tacatcttcctttccacaggaacgg

SEQ ID NO: 121461 - DNA, 25 bp, Homo sapien
tcacgggcagtggagtgcttccagt

SEQ ID NO: 121462 - DNA, 25 bp, Homo sapien
tcacgggcagtgcagtgcttccagt

SEQ ID NO: 121463 - DNA, 25 bp, Homo sapien
tccgtgtcaggtgtgcctcctcgtg

SEQ ID NO: 121464 - DNA, 25 bp, Homo sapien
tccgtgtcaggtctgcctcctcgtg

SEQ ID NO: 121465 - DNA, 25 bp, Homo sapien
gactcgtatgtaaaggggccccctg

SEQ ID NO: 121466 - DNA, 25 bp, Homo sapien
gactcgtatgtataggggccccctg

SEQ ID NO: 121467 - DNA, 25 bp, Homo sapien
gaccttgtcctctcatgggcgtcac

SEQ ID NO: 121468 - DNA, 25 bp, Homo sapien
gaccttgtcctcacatgggcgtcac

SEQ ID NO: 121469 - DNA, 25 bp, Homo sapien
taaagtttcgtccaacatgaaagca

SEQ ID NO: 121470 - DNA, 25 bp, Homo sapien
taaagtttcgtcgaacatgaaagca

SEQ ID NO: 121471 - DNA, 25 bp, Homo sapien
gaggttttcaagttccgtcaataga

SEQ ID NO: 121472 - DNA, 25 bp, Homo sapien
gaggttttcaagatccgtcaataga

SEQ ID NO: 121473 - DNA, 25 bp, Homo sapien
tgttccgtcacaatccagacctcga

SEQ ID NO: 121474 - DNA, 25 bp, Homo sapien
tgttccgtcacattccagacctcga

SEQ ID NO: 121475 - DNA, 25 bp, Homo sapien
gtactctcttcatgtccatgatgtt

SEQ ID NO: 121476 - DNA, 25 bp, Homo sapien
gtactctcttcaagtccatgatgtt

SEQ ID NO: 121477 - DNA, 25 bp, Homo sapien
gatacctgtttctttactcgggtct

SEQ ID NO: 121478 - DNA, 25 bp, Homo sapien
gatacctgtttcattactcgggtct

SEQ ID NO: 121479 - DNA, 25 bp, Homo sapien
aagatgtgtctcgtcctgacgtgtc

SEQ ID NO: 121480 - DNA, 25 bp, Homo sapien
aagatgtgtctcctcctgacgtgtc

SEQ ID NO: 121481 - DNA, 25 bp, Homo sapien
acacccggtgcgttaccagggagcg

SEQ ID NO: 121482 - DNA, 25 bp, Homo sapien
acacccggtgcgataccagggagcg

SEQ ID NO: 121483 - DNA, 25 bp, Homo sapien
agtgcaagcggaagtccaggtgttg

SEQ ID NO: 121484 - DNA, 25 bp, Homo sapien
agtgcaagcggatgtccaggtgttg

SEQ ID NO: 121485 - DNA, 25 bp, Homo sapien
acaatcacatgtggagactagtctt

SEQ ID NO: 121486 - DNA, 25 bp, Homo sapien
acaatcacatgtcgagactagtctt

SEQ ID NO: 121487 - DNA, 25 bp, Homo sapien
aatagactcacgatgtgccctgtgg

SEQ ID NO: 121488 - DNA, 25 bp, Homo sapien
aatagactcacgttgtgccctgtgg

SEQ ID NO: 121489 - DNA, 25 bp, Homo sapien
aggtcccagtccaacgacttctggt

SEQ ID NO: 121490 - DNA, 25 bp, Homo sapien
aggtcccagtcctacgacttctggt

SEQ ID NO: 121491 - DNA, 25 bp, Homo sapien
aagcccggttacgcgacttctgacg

SEQ ID NO: 121492 - DNA, 25 bp, Homo sapien
aagcccggttacccgacttctgacg

SEQ ID NO: 121493 - DNA, 25 bp, Homo sapien
aggtcggtcttttgacacgtcctga

SEQ ID NO: 121494 - DNA, 25 bp, Homo sapien
aggtcggtctttagacacgtcctga

SEQ ID NO: 121495 - DNA, 25 bp, Homo sapien
tcgacataagttaatctgtcaagtt

SEQ ID NO: 121496 - DNA, 25 bp, Homo sapien
tcgacataagtttatctgtcaagtt

SEQ ID NO: 121497 - DNA, 25 bp, Homo sapien
gacatgtagatttccgtacttcgtg

SEQ ID NO: 121498 - DNA, 25 bp, Homo sapien
gacatgtagattaccgtacttcgtg

SEQ ID NO: 121499 - DNA, 25 bp, Homo sapien
tccatgtgtatgtgtggatttctca

SEQ ID NO: 121500 - DNA, 25 bp, Homo sapien
tccatgtgtatgagtggatttctca

SEQ ID NO: 121501 - DNA, 25 bp, Homo sapien
tgtagagtggaggagtcttgtccac

SEQ ID NO: 121502 - DNA, 25 bp, Homo sapien
tgtagagtggagcagtcttgtccac

SEQ ID NO: 121503 - DNA, 25 bp, Homo sapien
cccagaagacctacgaaatctctga

SEQ ID NO: 121504 - DNA, 25 bp, Homo sapien
cccagaagaccttcgaaatctctga

SEQ ID NO: 121505 - DNA, 25 bp, Homo sapien
aggacgttaccgtgaccattcactg

SEQ ID NO: 121506 - DNA, 25 bp, Homo sapien
aggacgttaccgagaccattcactg

SEQ ID NO: 121507 - DNA, 25 bp, Homo sapien
aaatattaccgactcaccagtaagg

SEQ ID NO: 121508 - DNA, 25 bp, Homo sapien
aaatattaccgagtcaccagtaagg

SEQ ID NO: 121509 - DNA, 25 bp, Homo sapien
aattagttccagtcctcgtttagta

SEQ ID NO: 121510 - DNA, 25 bp, Homo sapien
aattagttccagacctcgtttagta

SEQ ID NO: 121511 - DNA, 25 bp, Homo sapien
tataggttggctattatccattctt

SEQ ID NO: 121512 - DNA, 25 bp, Homo sapien
tataggttggcttttatccattctt

SEQ ID NO: 121513 - DNA, 25 bp, Homo sapien
aaggtggagctttagttccacattt

SEQ ID NO: 121514 - DNA, 25 bp, Homo sapien
aaggtggagcttaagttccacattt

SEQ ID NO: 121515 - DNA, 25 bp, Homo sapien
cgggtggctgaactccgtacttaag

SEQ ID NO: 121516 - DNA, 25 bp, Homo sapien
cgggtggctgaagtccgtacttaag

SEQ ID NO: 121517 - DNA, 25 bp, Homo sapien
ggtgtgtggttctttcagtacttca

SEQ ID NO: 121518 - DNA, 25 bp, Homo sapien
ggtgtgtggttcattcagtacttca

SEQ ID NO: 121519 - DNA, 25 bp, Homo sapien
tggagaaagtccactcgtactatta

SEQ ID NO: 121520 - DNA, 25 bp, Homo sapien
tggagaaagtcctctcgtactatta

SEQ ID NO: 121521 - DNA, 25 bp, Homo sapien
ttacgtgtaaataccgaactaagga

SEQ ID NO: 121522 - DNA, 25 bp, Homo sapien
ttacgtgtaaattccgaactaagga

SEQ ID NO: 121523 - DNA, 25 bp, Homo sapien
tgtgtccacttggtcagtttaagta

SEQ ID NO: 121524 - DNA, 25 bp, Homo sapien
tgtgtccacttgctcagtttaagta

SEQ ID NO: 121525 - DNA, 25 bp, Homo sapien
cactgaaacgtttcggaaagtgtcc

SEQ ID NO: 121526 - DNA, 25 bp, Homo sapien
cactgaaacgttacggaaagtgtcc

SEQ ID NO: 121527 - DNA, 25 bp, Homo sapien
ctacagtaacatggacggaagtccc

SEQ ID NO: 121528 - DNA, 25 bp, Homo sapien
ctacagtaacatcgacggaagtccc

SEQ ID NO: 121529 - DNA, 25 bp, Homo sapien
ctaaacccggatcgacaaagtccct

SEQ ID NO: 121530 - DNA, 25 bp, Homo sapien
ctaaacccggatggacaaagtccct

SEQ ID NO: 121531 - DNA, 25 bp, Homo sapien
tgtaaaaaggttctagtggaaccct

SEQ ID NO: 121532 - DNA, 25 bp, Homo sapien
tgtaaaaaggttgtagtggaaccct

SEQ ID NO: 121533 - DNA, 25 bp, Homo sapien
agaaaaagcatctctggtaccacac

SEQ ID NO: 121534 - DNA, 25 bp, Homo sapien
agaaaaagcatcactggtaccacac

SEQ ID NO: 121535 - DNA, 25 bp, Homo sapien
tgacgagaagaagaccgggagcccc

SEQ ID NO: 121536 - DNA, 25 bp, Homo sapien
tgacgagaagaacaccgggagcccc

SEQ ID NO: 121537 - DNA, 25 bp, Homo sapien
ccgtttaagtctactgtcgggaccc

SEQ ID NO: 121538 - DNA, 25 bp, Homo sapien
ccgtttaagtcttctgtcgggaccc

SEQ ID NO: 121539 - DNA, 25 bp, Homo sapien
gtgtgggatccctgtgcgctagaac

SEQ ID NO: 121540 - DNA, 25 bp, Homo sapien
gtgtgggatcccagtgcgctagaac

SEQ ID NO: 121541 - DNA, 25 bp, Homo sapien
agtcggagcaccaggtccctcatcg

SEQ ID NO: 121542 - DNA, 25 bp, Homo sapien
agtcggagcacctggtccctcatcg

SEQ ID NO: 121543 - DNA, 25 bp, Homo sapien
cagggaaacccgagacctctcgttc

SEQ ID NO: 121544 - DNA, 25 bp, Homo sapien
cagggaaacccgtgacctctcgttc

SEQ ID NO: 121545 - DNA, 25 bp, Homo sapien
gggaattaacctgacagtcggactt

SEQ ID NO: 121546 - DNA, 25 bp, Homo sapien
gggaattaacctcacagtcggactt

SEQ ID NO: 121547 - DNA, 25 bp, Homo sapien
gaagaaagaggtacctcaaaatatt

SEQ ID NO: 121548 - DNA, 25 bp, Homo sapien
gaagaaagaggttcctcaaaatatt

SEQ ID NO: 121549 - DNA, 25 bp, Homo sapien
cataaaatgttttacttattgttac

SEQ ID NO: 121550 - DNA, 25 bp, Homo sapien
cataaaatgtttaacttattgttac

SEQ ID NO: 121551 - DNA, 25 bp, Homo sapien
aatactaatgttattgtttcgtaga

SEQ ID NO: 121552 - DNA, 25 bp, Homo sapien
aatactaatgtttttgtttcgtaga

SEQ ID NO: 121553 - DNA, 25 bp, Homo sapien
acctcgactgtgttttgttgttaat

SEQ ID NO: 121554 - DNA, 25 bp, Homo sapien
acctcgactgtgatttgttgttaat

SEQ ID NO: 121555 - DNA, 25 bp, Homo sapien
cgtcgtcgcatgtaatcattaatat

SEQ ID NO: 121556 - DNA, 25 bp, Homo sapien
cgtcgtcgcatgaaatcattaatat

SEQ ID NO: 121557 - DNA, 25 bp, Homo sapien
ctgtcttgtcagtaagcacgtgtag

SEQ ID NO: 121558 - DNA, 25 bp, Homo sapien
ctgtcttgtcagaaagcacgtgtag

SEQ ID NO: 121559 - DNA, 25 bp, Homo sapien
actgtctctcgaaacccatacagtg

SEQ ID NO: 121560 - DNA, 25 bp, Homo sapien
actgtctctcgatacccatacagtg

SEQ ID NO: 121561 - DNA, 25 bp, Homo sapien
cttatttccgataccgtgaactagg

SEQ ID NO: 121562 - DNA, 25 bp, Homo sapien
cttatttccgattccgtgaactagg

SEQ ID NO: 121563 - DNA, 25 bp, Homo sapien
aaaccgttccgacttgtacagaggg

SEQ ID NO: 121564 - DNA, 25 bp, Homo sapien
aaaccgttccgagttgtacagaggg

SEQ ID NO: 121565 - DNA, 25 bp, Homo sapien
attccgtccgtgtgttaccggtgtg

SEQ ID NO: 121566 - DNA, 25 bp, Homo sapien
attccgtccgtgagttaccggtgtg

SEQ ID NO: 121567 - DNA, 25 bp, Homo sapien
ggtcttttattgtccttacatgatc

SEQ ID NO: 121568 - DNA, 25 bp, Homo sapien
ggtcttttattgaccttacatgatc

SEQ ID NO: 121569 - DNA, 25 bp, Homo sapien
cttatgtcggtagacccaaggctac

SEQ ID NO: 121570 - DNA, 25 bp, Homo sapien
cttatgtcggtacacccaaggctac

SEQ ID NO: 121571 - DNA, 25 bp, Homo sapien
agagtgaggtatccttaaagactca

SEQ ID NO: 121572 - DNA, 25 bp, Homo sapien
agagtgaggtatgcttaaagactca

SEQ ID NO: 121573 - DNA, 25 bp, Homo sapien
ctcttcctcgtccaggtcacaaggg

SEQ ID NO: 121574 - DNA, 25 bp, Homo sapien
ctcttcctcgtcgaggtcacaaggg

SEQ ID NO: 121575 - DNA, 25 bp, Homo sapien
tggacgaccgtaaccctccttggtt

SEQ ID NO: 121576 - DNA, 25 bp, Homo sapien
tggacgaccgtatccctccttggtt

SEQ ID NO: 121577 - DNA, 25 bp, Homo sapien
acgtccgattccaatccgtccggtt

SEQ ID NO: 121578 - DNA, 25 bp, Homo sapien
acgtccgattcctatccgtccggtt

SEQ ID NO: 121579 - DNA, 25 bp, Homo sapien
tgtcaagtacgctatccgtcacaga

SEQ ID NO: 121580 - DNA, 25 bp, Homo sapien
tgtcaagtacgcaatccgtcacaga

SEQ ID NO: 121581 - DNA, 25 bp, Homo sapien
gggttcagtatagatacactcgaaa

SEQ ID NO: 121582 - DNA, 25 bp, Homo sapien
gggttcagtatacatacactcgaaa

SEQ ID NO: 121583 - DNA, 25 bp, Homo sapien
ccagtactacttcgagttattagag

SEQ ID NO: 121584 - DNA, 25 bp, Homo sapien
ccagtactacttggagttattagag

SEQ ID NO: 121585 - DNA, 25 bp, Homo sapien
gtaggaaaggaatctgtatacccga

SEQ ID NO: 121586 - DNA, 25 bp, Homo sapien
gtaggaaaggaaactgtatacccga

SEQ ID NO: 121587 - DNA, 25 bp, Homo sapien
tacactacggaccatcttctccgag

SEQ ID NO: 121588 - DNA, 25 bp, Homo sapien
tacactacggacgatcttctccgag

SEQ ID NO: 121589 - DNA, 25 bp, Homo sapien
ggtgagtgcgacgacagtattctga

SEQ ID NO: 121590 - DNA, 25 bp, Homo sapien
ggtgagtgcgaccacagtattctga

SEQ ID NO: 121591 - DNA, 25 bp, Homo sapien
acggtgataccgaccctgtatacca

SEQ ID NO: 121592 - DNA, 25 bp, Homo sapien
acggtgataccgtccctgtatacca

SEQ ID NO: 121593 - DNA, 25 bp, Homo sapien
acttgaagtgtctcgattgtgtcct

SEQ ID NO: 121594 - DNA, 25 bp, Homo sapien
acttgaagtgtcacgattgtgtcct

SEQ ID NO: 121595 - DNA, 25 bp, Homo sapien
accttgaagtgacacggtaagtccc

SEQ ID NO: 121596 - DNA, 25 bp, Homo sapien
accttgaagtgagacggtaagtccc

SEQ ID NO: 121597 - DNA, 25 bp, Homo sapien
tttaagagttaagtccgtcagacaa

SEQ ID NO: 121598 - DNA, 25 bp, Homo sapien
tttaagagttaactccgtcagacaa

SEQ ID NO: 121599 - DNA, 25 bp, Homo sapien
tatcgacgttatctgattatgactc

SEQ ID NO: 121600 - DNA, 25 bp, Homo sapien
tatcgacgttatgtgattatgactc

SEQ ID NO: 121601 - DNA, 25 bp, Homo sapien
agacgaccatggttattcgtataac

SEQ ID NO: 121602 - DNA, 25 bp, Homo sapien
agacgaccatggatattcgtataac

SEQ ID NO: 121603 - DNA, 25 bp, Homo sapien
tgtaagtcccaacgaagatcgataa

SEQ ID NO: 121604 - DNA, 25 bp, Homo sapien
tgtaagtcccaaggaagatcgataa

SEQ ID NO: 121605 - DNA, 25 bp, Homo sapien
acgcctagaggaggactcggtacga

SEQ ID NO: 121606 - DNA, 25 bp, Homo sapien
acgcctagaggacgactcggtacga

SEQ ID NO: 121607 - DNA, 25 bp, Homo sapien
ctaaaagaagcgaacctaacgtggc

SEQ ID NO: 121608 - DNA, 25 bp, Homo sapien
ctaaaagaagcgtacctaacgtggc

SEQ ID NO: 121609 - DNA, 25 bp, Homo sapien
ctcatgcgatcactccatacagatg

SEQ ID NO: 121610 - DNA, 25 bp, Homo sapien
ctcatgcgatcagtccatacagatg

SEQ ID NO: 121611 - DNA, 25 bp, Homo sapien
ggtatagacttgtcccataaactgt

SEQ ID NO: 121612 - DNA, 25 bp, Homo sapien
ggtatagacttgacccataaactgt

SEQ ID NO: 121613 - DNA, 25 bp, Homo sapien
aaaaacattgcgaccaacgacactg

SEQ ID NO: 121614 - DNA, 25 bp, Homo sapien
aaaaacattgcgtccaacgacactg

SEQ ID NO: 121615 - DNA, 25 bp, Homo sapien
agaagtaatttcgtctgaagtcctg

SEQ ID NO: 121616 - DNA, 25 bp, Homo sapien
agaagtaatttcctctgaagtcctg

SEQ ID NO: 121617 - DNA, 25 bp, Homo sapien
tactactgacgacaatgctttgtgt

SEQ ID NO: 121618 - DNA, 25 bp, Homo sapien
tactactgacgagaatgctttgtgt

SEQ ID NO: 121619 - DNA, 25 bp, Homo sapien
atacaatgtcgaggacatcttttgg

SEQ ID NO: 121620 - DNA, 25 bp, Homo sapien
atacaatgtcgacgacatcttttgg

SEQ ID NO: 121621 - DNA, 25 bp, Homo sapien
agagaaagtcattcttcctcttgat

SEQ ID NO: 121622 - DNA, 25 bp, Homo sapien
agagaaagtcatacttcctcttgat

SEQ ID NO: 121623 - DNA, 25 bp, Homo sapien
agtaacaaggtgaccctgaactcga

SEQ ID NO: 121624 - DNA, 25 bp, Homo sapien
agtaacaaggtgtccctgaactcga

SEQ ID NO: 121625 - DNA, 25 bp, Homo sapien
ctggtcgactaacacgttatgaaat

SEQ ID NO: 121626 - DNA, 25 bp, Homo sapien
ctggtcgactaagacgttatgaaat

SEQ ID NO: 121627 - DNA, 25 bp, Homo sapien
agagtgtgtcgacgatgtaccagaa

SEQ ID NO: 121628 - DNA, 25 bp, Homo sapien
agagtgtgtcgaggatgtaccagaa

SEQ ID NO: 121629 - DNA, 25 bp, Homo sapien
cgtgagtcgtcctactgggtattac

SEQ ID NO: 121630 - DNA, 25 bp, Homo sapien
cgtgagtcgtccaactgggtattac

SEQ ID NO: 121631 - DNA, 25 bp, Homo sapien
gtagactcctacaagttggacttag

SEQ ID NO: 121632 - DNA, 25 bp, Homo sapien
gtagactcctactagttggacttag

SEQ ID NO: 121633 - DNA, 25 bp, Homo sapien
aagacgactaatttagggacctatc

SEQ ID NO: 121634 - DNA, 25 bp, Homo sapien
aagacgactaatatagggacctatc

SEQ ID NO: 121635 - DNA, 25 bp, Homo sapien
aagacgtctcctttcagtgggtacc

SEQ ID NO: 121636 - DNA, 25 bp, Homo sapien
aagacgtctcctatcagtgggtacc

SEQ ID NO: 121637 - DNA, 25 bp, Homo sapien
actgtgtccgaaccaggagagacga

SEQ ID NO: 121638 - DNA, 25 bp, Homo sapien
actgtgtccgaagcaggagagacga

SEQ ID NO: 121639 - DNA, 25 bp, Homo sapien
aacttagtgaaatccgaagagacct

SEQ ID NO: 121640 - DNA, 25 bp, Homo sapien
aacttagtgaaaaccgaagagacct

SEQ ID NO: 121641 - DNA, 25 bp, Homo sapien
cctcccgtgagaaaccaactgtaag

SEQ ID NO: 121642 - DNA, 25 bp, Homo sapien
cctcccgtgagataccaactgtaag

SEQ ID NO: 121643 - DNA, 25 bp, Homo sapien
gtcgagacctttttaccacaggaga

SEQ ID NO: 121644 - DNA, 25 bp, Homo sapien
gtcgagacctttataccacaggaga

SEQ ID NO: 121645 - DNA, 25 bp, Homo sapien
ccggcacgtcttcgtcgggcaggac

SEQ ID NO: 121646 - DNA, 25 bp, Homo sapien
ccggcacgtcttggtcgggcaggac

SEQ ID NO: 121647 - DNA, 25 bp, Homo sapien
gtgtgtatgtctttaagtgcccgtc

SEQ ID NO: 121648 - DNA, 25 bp, Homo sapien
gtgtgtatgtctataagtgcccgtc

SEQ ID NO: 121649 - DNA, 25 bp, Homo sapien
aatgtatatcttataactcacttct

SEQ ID NO: 121650 - DNA, 25 bp, Homo sapien
aatgtatatcttttaactcacttct

SEQ ID NO: 121651 - DNA, 25 bp, Homo sapien
cccggtcagttttatcacttcttcg

SEQ ID NO: 121652 - DNA, 25 bp, Homo sapien
cccggtcagtttaatcacttcttcg

SEQ ID NO: 121653 - DNA, 25 bp, Homo sapien
gtgcaccggtgatgttacttcttct

SEQ ID NO: 121654 - DNA, 25 bp, Homo sapien
gtgcaccggtgaagttacttcttct

SEQ ID NO: 121655 - DNA, 25 bp, Homo sapien
gggtcacaggtaaatctttgtactt

SEQ ID NO: 121656 - DNA, 25 bp, Homo sapien
gggtcacaggtatatctttgtactt

SEQ ID NO: 121657 - DNA, 25 bp, Homo sapien
tcgggtcttttaaatgtctctggta

SEQ ID NO: 121658 - DNA, 25 bp, Homo sapien
tcgggtcttttatatgtctctggta

SEQ ID NO: 121659 - DNA, 25 bp, Homo sapien
gtgttcgtcatttttcgtcggtcga

SEQ ID NO: 121660 - DNA, 25 bp, Homo sapien
gtgttcgtcattattcgtcggtcga

SEQ ID NO: 121661 - DNA, 25 bp, Homo sapien
atatatactctctttcgatgtcggt

SEQ ID NO: 121662 - DNA, 25 bp, Homo sapien
atatatactctcattcgatgtcggt

SEQ ID NO: 121663 - DNA, 25 bp, Homo sapien
actattacataccatatgatatatt

SEQ ID NO: 121664 - DNA, 25 bp, Homo sapien
actattacatacgatatgatatatt

SEQ ID NO: 121665 - DNA, 25 bp, Homo sapien
tctattagttgatccgacagacgta

SEQ ID NO: 121666 - DNA, 25 bp, Homo sapien
tctattagttgaaccgacagacgta

SEQ ID NO: 121667 - DNA, 25 bp, Homo sapien
tcgtgttactactgtcccaccgttc

SEQ ID NO: 121668 - DNA, 25 bp, Homo sapien
tcgtgttactacagtcccaccgttc

SEQ ID NO: 121669 - DNA, 25 bp, Homo sapien
cctgtcgggaagacacgacagctac

SEQ ID NO: 121670 - DNA, 25 bp, Homo sapien
cctgtcgggaagtcacgacagctac

SEQ ID NO: 121671 - DNA, 25 bp, Homo sapien
ataatcggttacgtgacatctcaac

SEQ ID NO: 121672 - DNA, 25 bp, Homo sapien
ataatcggttacctgacatctcaac

SEQ ID NO: 121673 - DNA, 25 bp, Homo sapien
agagtctataggtagggaatcctca

SEQ ID NO: 121674 - DNA, 25 bp, Homo sapien
agagtctataggaagggaatcctca

SEQ ID NO: 121675 - DNA, 25 bp, Homo sapien
ggagctcgaggacctagaaaacccc

SEQ ID NO: 121676 - DNA, 25 bp, Homo sapien
ggagctcgaggagctagaaaacccc

SEQ ID NO: 121677 - DNA, 25 bp, Homo sapien
aataacgtcgagtaaagatccccca

SEQ ID NO: 121678 - DNA, 25 bp, Homo sapien
aataacgtcgagaaaagatccccca

SEQ ID NO: 121679 - DNA, 25 bp, Homo sapien
gtcactccgggaccgggacccaaca

SEQ ID NO: 121680 - DNA, 25 bp, Homo sapien
gtcactccgggagcgggacccaaca

SEQ ID NO: 121681 - DNA, 25 bp, Homo sapien
ctgttgcgggtgttgtcccagaccg

SEQ ID NO: 121682 - DNA, 25 bp, Homo sapien
ctgttgcgggtgatgtcccagaccg

SEQ ID NO: 121683 - DNA, 25 bp, Homo sapien
tatgagtgagaaggattcccgtttc

SEQ ID NO: 121684 - DNA, 25 bp, Homo sapien
tatgagtgagaacgattcccgtttc

SEQ ID NO: 121685 - DNA, 25 bp, Homo sapien
ggtcgagaagaacagactccatttc

SEQ ID NO: 121686 - DNA, 25 bp, Homo sapien
ggtcgagaagaagagactccatttc

SEQ ID NO: 121687 - DNA, 25 bp, Homo sapien
ggaaaagacattggttctacttccg

SEQ ID NO: 121688 - DNA, 25 bp, Homo sapien
ggaaaagacattcgttctacttccg

SEQ ID NO: 121689 - DNA, 25 bp, Homo sapien
tacgtaagagaatgaccatgagtcc

SEQ ID NO: 121690 - DNA, 25 bp, Homo sapien
tacgtaagagaaagaccatgagtcc

SEQ ID NO: 121691 - DNA, 25 bp, Homo sapien
ctacgagagaaaagaggtaccttta

SEQ ID NO: 121692 - DNA, 25 bp, Homo sapien
ctacgagagaaatgaggtaccttta

SEQ ID NO: 121693 - DNA, 25 bp, Homo sapien
gtctgagagactacaactcattcta

SEQ ID NO: 121694 - DNA, 25 bp, Homo sapien
gtctgagagacttcaactcattcta

SEQ ID NO: 121695 - DNA, 25 bp, Homo sapien
tcgtcggtcacttcatctaaggctg

SEQ ID NO: 121696 - DNA, 25 bp, Homo sapien
tcgtcggtcactacatctaaggctg

SEQ ID NO: 121697 - DNA, 25 bp, Homo sapien
gatccctactccttcttacggagtc

SEQ ID NO: 121698 - DNA, 25 bp, Homo sapien
gatccctactccatcttacggagtc

SEQ ID NO: 121699 - DNA, 25 bp, Homo sapien
gtggtccgttacaccaaacacgctc

SEQ ID NO: 121700 - DNA, 25 bp, Homo sapien
gtggtccgttactccaaacacgctc

SEQ ID NO: 121701 - DNA, 25 bp, Homo sapien
acctggggacccttctacgaaagga

SEQ ID NO: 121702 - DNA, 25 bp, Homo sapien
acctggggacccatctacgaaagga

SEQ ID NO: 121703 - DNA, 25 bp, Homo sapien
agtggatgacccacgagaaggtgtc

SEQ ID NO: 121704 - DNA, 25 bp, Homo sapien
agtggatgaccctcgagaaggtgtc

SEQ ID NO: 121705 - DNA, 25 bp, Homo sapien
gggtctttcaggtactcaaaaatgt

SEQ ID NO: 121706 - DNA, 25 bp, Homo sapien
gggtctttcaggaactcaaaaatgt

SEQ ID NO: 121707 - DNA, 25 bp, Homo sapien
acgtgtgatgtttctaaaaccatat

SEQ ID NO: 121708 - DNA, 25 bp, Homo sapien
acgtgtgatgttactaaaaccatat

SEQ ID NO: 121709 - DNA, 25 bp, Homo sapien
gaattgagtcactaaaatcatgtac

SEQ ID NO: 121710 - DNA, 25 bp, Homo sapien
gaattgagtcacaaaaatcatgtac

SEQ ID NO: 121711 - DNA, 25 bp, Homo sapien
gaggttttcgttatcattactgtac

SEQ ID NO: 121712 - DNA, 25 bp, Homo sapien
gaggttttcgttttcattactgtac

SEQ ID NO: 121713 - DNA, 25 bp, Homo sapien
aagatgtccttgaccgattctgtct

SEQ ID NO: 121714 - DNA, 25 bp, Homo sapien
aagatgtccttgtccgattctgtct

SEQ ID NO: 121715 - DNA, 25 bp, Homo sapien
gtcccgggactgctccatctcgaag

SEQ ID NO: 121716 - DNA, 25 bp, Homo sapien
gtcccgggactggtccatctcgaag

SEQ ID NO: 121717 - DNA, 25 bp, Homo sapien
aacgtactaatgatatcaaccgaag

SEQ ID NO: 121718 - DNA, 25 bp, Homo sapien
aacgtactaatgttatcaaccgaag

SEQ ID NO: 121719 - DNA, 25 bp, Homo sapien
caagtccggggtctcgtcacggaga

SEQ ID NO: 121720 - DNA, 25 bp, Homo sapien
caagtccggggtgtcgtcacggaga

SEQ ID NO: 121721 - DNA, 25 bp, Homo sapien
cccttagggtgaaacgtctgaccca

SEQ ID NO: 121722 - DNA, 25 bp, Homo sapien
cccttagggtgatacgtctgaccca

SEQ ID NO: 121723 - DNA, 25 bp, Homo sapien
tgtctcttggagtcttctgtcccgg

SEQ ID NO: 121724 - DNA, 25 bp, Homo sapien
tgtctcttggagacttctgtcccgg

SEQ ID NO: 121725 - DNA, 25 bp, Homo sapien
tcctcttggggactctctctactaa

SEQ ID NO: 121726 - DNA, 25 bp, Homo sapien
tcctcttggggagtctctctactaa

SEQ ID NO: 121727 - DNA, 25 bp, Homo sapien
ctggttgtgccagttagtctagtaa

SEQ ID NO: 121728 - DNA, 25 bp, Homo sapien
ctggttgtgccacttagtctagtaa

SEQ ID NO: 121729 - DNA, 25 bp, Homo sapien
ttgtaccatttcaaaacacgattat

SEQ ID NO: 121730 - DNA, 25 bp, Homo sapien
ttgtaccatttctaaacacgattat

SEQ ID NO: 121731 - DNA, 25 bp, Homo sapien
cctgtctccttgtttgtgtcgggtg

SEQ ID NO: 121732 - DNA, 25 bp, Homo sapien
cctgtctccttgattgtgtcgggtg

SEQ ID NO: 121733 - DNA, 25 bp, Homo sapien
tcttcatagtcgtggctttggagtg

SEQ ID NO: 121734 - DNA, 25 bp, Homo sapien
tcttcatagtcgaggctttggagtg

SEQ ID NO: 121735 - DNA, 25 bp, Homo sapien
ctgttatggtgattctcttcaagtg

SEQ ID NO: 121736 - DNA, 25 bp, Homo sapien
ctgttatggtgaatctcttcaagtg

SEQ ID NO: 121737 - DNA, 25 bp, Homo sapien
gtcgttgaggtcacttaccatgagt

SEQ ID NO: 121738 - DNA, 25 bp, Homo sapien
gtcgttgaggtctcttaccatgagt

SEQ ID NO: 121739 - DNA, 25 bp, Homo sapien
cggttgaggagaccactccagtgat

SEQ ID NO: 121740 - DNA, 25 bp, Homo sapien
cggttgaggagagcactccagtgat

SEQ ID NO: 121741 - DNA, 25 bp, Homo sapien
tcgtgttctgacagtcctcaaagga

SEQ ID NO: 121742 - DNA, 25 bp, Homo sapien
tcgtgttctgactgtcctcaaagga

SEQ ID NO: 121743 - DNA, 25 bp, Homo sapien
gcatgttaactgtctccgggacgtc

SEQ ID NO: 121744 - DNA, 25 bp, Homo sapien
gcatgttaactgactccgggacgtc

SEQ ID NO: 121745 - DNA, 25 bp, Homo sapien
tagacgtttcagtgggtcccggacc

SEQ ID NO: 121746 - DNA, 25 bp, Homo sapien
tagacgtttcagagggtcccggacc

SEQ ID NO: 121747 - DNA, 25 bp, Homo sapien
tcactcctcgtcgagggccgatggg

SEQ ID NO: 121748 - DNA, 25 bp, Homo sapien
tcactcctcgtccagggccgatggg

SEQ ID NO: 121749 - DNA, 25 bp, Homo sapien
acagacctcctcgttttcctttcgg

SEQ ID NO: 121750 - DNA, 25 bp, Homo sapien
acagacctcctccttttcctttcgg

SEQ ID NO: 121751 - DNA, 25 bp, Homo sapien
cgtctgtaaccctttcaacggttgg

SEQ ID NO: 121752 - DNA, 25 bp, Homo sapien
cgtctgtaacccattcaacggttgg

SEQ ID NO: 121753 - DNA, 25 bp, Homo sapien
ctccgcggacagcaacgcttacgac

SEQ ID NO: 121754 - DNA, 25 bp, Homo sapien
ctccgcggacaggaacgcttacgac

SEQ ID NO: 121755 - DNA, 25 bp, Homo sapien
ctccgtaccgacagaagacccagta

SEQ ID NO: 121756 - DNA, 25 bp, Homo sapien
ctccgtaccgactgaagacccagta

SEQ ID NO: 121757 - DNA, 25 bp, Homo sapien
tcctctgacgactaaaaccgtaaga

SEQ ID NO: 121758 - DNA, 25 bp, Homo sapien
tcctctgacgacaaaaaccgtaaga

SEQ ID NO: 121759 - DNA, 25 bp, Homo sapien
attcagagaatattaacacacagag

SEQ ID NO: 121760 - DNA, 25 bp, Homo sapien
attcagagaataataacacacagag

SEQ ID NO: 121761 - DNA, 25 bp, Homo sapien
aatttaagacttagaacgacacaag

SEQ ID NO: 121762 - DNA, 25 bp, Homo sapien
aatttaagactttgaacgacacaag

SEQ ID NO: 121763 - DNA, 25 bp, Homo sapien
taaagcagtgttgaccgtaaactag

SEQ ID NO: 121764 - DNA, 25 bp, Homo sapien
taaagcagtgttcaccgtaaactag

SEQ ID NO: 121765 - DNA, 25 bp, Homo sapien
taccactccggtttcggtgtgactt

SEQ ID NO: 121766 - DNA, 25 bp, Homo sapien
taccactccggtatcggtgtgactt

SEQ ID NO: 121767 - DNA, 25 bp, Homo sapien
ttaaccggctcaactacgggcgacc

SEQ ID NO: 121768 - DNA, 25 bp, Homo sapien
ttaaccggctcatctacgggcgacc

SEQ ID NO: 121769 - DNA, 25 bp, Homo sapien
cgaagtcgaccctgacgtggttagg

SEQ ID NO: 121770 - DNA, 25 bp, Homo sapien
cgaagtcgacccagacgtggttagg

SEQ ID NO: 121771 - DNA, 25 bp, Homo sapien
tctgaggtcgaccacctaggtcagg

SEQ ID NO: 121772 - DNA, 25 bp, Homo sapien
tctgaggtcgacgacctaggtcagg

SEQ ID NO: 121773 - DNA, 25 bp, Homo sapien
ttacctggtccgactcgacggggag

SEQ ID NO: 121774 - DNA, 25 bp, Homo sapien
ttacctggtccgtctcgacggggag

SEQ ID NO: 121775 - DNA, 25 bp, Homo sapien
ttacacaggaactctgtcggtgggt

SEQ ID NO: 121776 - DNA, 25 bp, Homo sapien
ttacacaggaacactgtcggtgggt

SEQ ID NO: 121777 - DNA, 25 bp, Homo sapien
accgaggacacaacagtcgtgttaa

SEQ ID NO: 121778 - DNA, 25 bp, Homo sapien
accgaggacacatcagtcgtgttaa

SEQ ID NO: 121779 - DNA, 25 bp, Homo sapien
atagatacacacaggatatacttgg

SEQ ID NO: 121780 - DNA, 25 bp, Homo sapien
atagatacacactggatatacttgg

SEQ ID NO: 121781 - DNA, 25 bp, Homo sapien
ccgggagctactggagctacggtaa

SEQ ID NO: 121782 - DNA, 25 bp, Homo sapien
ccgggagctactcgagctacggtaa

SEQ ID NO: 121783 - DNA, 25 bp, Homo sapien
tgtctggaggacctgaactccggct

SEQ ID NO: 121784 - DNA, 25 bp, Homo sapien
tgtctggaggacgtgaactccggct

SEQ ID NO: 121785 - DNA, 25 bp, Homo sapien
cgtccttgaggacgtgcatccaccg

SEQ ID NO: 121786 - DNA, 25 bp, Homo sapien
cgtccttgaggaggtgcatccaccg

SEQ ID NO: 121787 - DNA, 25 bp, Homo sapien
tgtgcctgagcggtcctcatccacc

SEQ ID NO: 121788 - DNA, 25 bp, Homo sapien
tgtgcctgagcgctcctcatccacc

SEQ ID NO: 121789 - DNA, 25 bp, Homo sapien
gtatttggtgttcctcagttcctcg

SEQ ID NO: 121790 - DNA, 25 bp, Homo sapien
gtatttggtgttgctcagttcctcg

SEQ ID NO: 121791 - DNA, 25 bp, Homo sapien
tgttttgcgtcttcgcccttgctac

SEQ ID NO: 121792 - DNA, 25 bp, Homo sapien
tgttttgcgtctacgcccttgctac

SEQ ID NO: 121793 - DNA, 25 bp, Homo sapien
ggttttcttaagctcatagtcactc

SEQ ID NO: 121794 - DNA, 25 bp, Homo sapien
ggttttcttaaggtcatagtcactc

SEQ ID NO: 121795 - DNA, 25 bp, Homo sapien
ggttttgtcttaacgaaacagtgca

SEQ ID NO: 121796 - DNA, 25 bp, Homo sapien
ggttttgtcttatcgaaacagtgca

SEQ ID NO: 121797 - DNA, 25 bp, Homo sapien
gccggttgttcttctactcattcca

SEQ ID NO: 121798 - DNA, 25 bp, Homo sapien
gccggttgttctactactcattcca

SEQ ID NO: 121799 - DNA, 25 bp, Homo sapien
tatgaattctgactactcatttcgg

SEQ ID NO: 121800 - DNA, 25 bp, Homo sapien
tatgaattctgagtactcatttcgg

SEQ ID NO: 121801 - DNA, 25 bp, Homo sapien
gtcaaacttttcgatgacatgttac

SEQ ID NO: 121802 - DNA, 25 bp, Homo sapien
gtcaaacttttccatgacatgttac

SEQ ID NO: 121803 - DNA, 25 bp, Homo sapien
cagagtaccttcttgttaaggttta

SEQ ID NO: 121804 - DNA, 25 bp, Homo sapien
cagagtaccttcatgttaaggttta

SEQ ID NO: 121805 - DNA, 25 bp, Homo sapien
acggtaccttcaatcagtccgtcaa

SEQ ID NO: 121806 - DNA, 25 bp, Homo sapien
acggtaccttcattcagtccgtcaa

SEQ ID NO: 121807 - DNA, 25 bp, Homo sapien
atccttactcggtgcagtcacgacg

SEQ ID NO: 121808 - DNA, 25 bp, Homo sapien
atccttactcggagcagtcacgacg

SEQ ID NO: 121809 - DNA, 25 bp, Homo sapien
taacgtcccggcagtcttccgtcgt

SEQ ID NO: 121810 - DNA, 25 bp, Homo sapien
taacgtcccggctgtcttccgtcgt

SEQ ID NO: 121811 - DNA, 25 bp, Homo sapien
ggagttagtcaagtgggttactctc

SEQ ID NO: 121812 - DNA, 25 bp, Homo sapien
ggagttagtcaactgggttactctc

SEQ ID NO: 121813 - DNA, 25 bp, Homo sapien
ggtagttgaacattctggttacctc

SEQ ID NO: 121814 - DNA, 25 bp, Homo sapien
ggtagttgaacaatctggttacctc

SEQ ID NO: 121815 - DNA, 25 bp, Homo sapien
ctatcggtcacacgtgtgagacatc

SEQ ID NO: 121816 - DNA, 25 bp, Homo sapien
ctatcggtcacaggtgtgagacatc

SEQ ID NO: 121817 - DNA, 25 bp, Homo sapien
accgggattttattcgcacgcggta

SEQ ID NO: 121818 - DNA, 25 bp, Homo sapien
accgggattttaatcgcacgcggta

SEQ ID NO: 121819 - DNA, 25 bp, Homo sapien
taaagaggtaacgtttatccccatt

SEQ ID NO: 121820 - DNA, 25 bp, Homo sapien
taaagaggtaacctttatccccatt

SEQ ID NO: 121821 - DNA, 25 bp, Homo sapien
aggacttacacgtgtgtaccccatt

SEQ ID NO: 121822 - DNA, 25 bp, Homo sapien
aggacttacacgagtgtaccccatt

SEQ ID NO: 121823 - DNA, 25 bp, Homo sapien
ggtcgtcagtgagtactcacgcatg

SEQ ID NO: 121824 - DNA, 25 bp, Homo sapien
ggtcgtcagtgactactcacgcatg

SEQ ID NO: 121825 - DNA, 25 bp, Homo sapien
tcttggtgtccacatagcagtcatg

SEQ ID NO: 121826 - DNA, 25 bp, Homo sapien
tcttggtgtccagatagcagtcatg

SEQ ID NO: 121827 - DNA, 25 bp, Homo sapien
ctattgtcccatttgatgacacggt

SEQ ID NO: 121828 - DNA, 25 bp, Homo sapien
ctattgtcccatatgatgacacggt

SEQ ID NO: 121829 - DNA, 25 bp, Homo sapien
ctttgttacccgtcgaaaccaccgg

SEQ ID NO: 121830 - DNA, 25 bp, Homo sapien
ctttgttacccgacgaaaccaccgg

SEQ ID NO: 121831 - DNA, 25 bp, Homo sapien
ttgtccacccggtgaccacgtcgtg

SEQ ID NO: 121832 - DNA, 25 bp, Homo sapien
ttgtccacccggagaccacgtcgtg

SEQ ID NO: 121833 - DNA, 25 bp, Homo sapien
cttttggtgccgacacacctcgtgt

SEQ ID NO: 121834 - DNA, 25 bp, Homo sapien
cttttggtgccgtcacacctcgtgt

SEQ ID NO: 121835 - DNA, 25 bp, Homo sapien
gatagtgtgtgacgaaacacattct

SEQ ID NO: 121836 - DNA, 25 bp, Homo sapien
gatagtgtgtgaggaaacacattct

SEQ ID NO: 121837 - DNA, 25 bp, Homo sapien
cttgacacgacgacgaccctcaggt

SEQ ID NO: 121838 - DNA, 25 bp, Homo sapien
cttgacacgacgtcgaccctcaggt

SEQ ID NO: 121839 - DNA, 25 bp, Homo sapien
gcttctgcgaggactcctcgacgtg

SEQ ID NO: 121840 - DNA, 25 bp, Homo sapien
gcttctgcgaggtctcctcgacgtg

SEQ ID NO: 121841 - DNA, 25 bp, Homo sapien
ttgtacgagattcgtacgtctttcg

SEQ ID NO: 121842 - DNA, 25 bp, Homo sapien
ttgtacgagattggtacgtctttcg

SEQ ID NO: 121843 - DNA, 25 bp, Homo sapien
attggtcggatcctaactctttcgt

SEQ ID NO: 121844 - DNA, 25 bp, Homo sapien
attggtcggatcgtaactctttcgt

SEQ ID NO: 121845 - DNA, 25 bp, Homo sapien
cccgtcggggagcacgacgtgtacc

SEQ ID NO: 121846 - DNA, 25 bp, Homo sapien
cccgtcggggaggacgacgtgtacc

SEQ ID NO: 121847 - DNA, 25 bp, Homo sapien
gccatcgcgagtagtagtgtcgtct

SEQ ID NO: 121848 - DNA, 25 bp, Homo sapien
gccatcgcgagttgtagtgtcgtct

SEQ ID NO: 121849 - DNA, 25 bp, Homo sapien
catgtgggttggggtcgagtcgatt

SEQ ID NO: 121850 - DNA, 25 bp, Homo sapien
catgtgggttggcgtcgagtcgatt

SEQ ID NO: 121851 - DNA, 25 bp, Homo sapien
ccaacgtttcggtgttctacgatac

SEQ ID NO: 121852 - DNA, 25 bp, Homo sapien
ccaacgtttcggagttctacgatac

SEQ ID NO: 121853 - DNA, 25 bp, Homo sapien
tcgcgactactctgggggctccgaa

SEQ ID NO: 121854 - DNA, 25 bp, Homo sapien
tcgcgactactcagggggctccgaa

SEQ ID NO: 121855 - DNA, 25 bp, Homo sapien
gccggacccgtggaaacttcgacga

SEQ ID NO: 121856 - DNA, 25 bp, Homo sapien
gccggacccgtgcaaacttcgacga

SEQ ID NO: 121857 - DNA, 25 bp, Homo sapien
tgcctacccaggtaaggtctacgaa

SEQ ID NO: 121858 - DNA, 25 bp, Homo sapien
tgcctacccaggaaaggtctacgaa

SEQ ID NO: 121859 - DNA, 25 bp, Homo sapien
aacgaacaccgcaagagcaacgacc

SEQ ID NO: 121860 - DNA, 25 bp, Homo sapien
aacgaacaccgctagagcaacgacc

SEQ ID NO: 121861 - DNA, 25 bp, Homo sapien
ggaattagtctgaggtgagtcaacc

SEQ ID NO: 121862 - DNA, 25 bp, Homo sapien
ggaattagtctgtggtgagtcaacc

SEQ ID NO: 121863 - DNA, 25 bp, Homo sapien
agtcacgtcgctactgacacaagta

SEQ ID NO: 121864 - DNA, 25 bp, Homo sapien
agtcacgtcgcttctgacacaagta

SEQ ID NO: 121865 - DNA, 25 bp, Homo sapien
ccgtccttcttctactatgagtacg

SEQ ID NO: 121866 - DNA, 25 bp, Homo sapien
ccgtccttcttcaactatgagtacg

SEQ ID NO: 121867 - DNA, 25 bp, Homo sapien
gccactctctttcagagcttcgaga

SEQ ID NO: 121868 - DNA, 25 bp, Homo sapien
gccactctctttgagagcttcgaga

SEQ ID NO: 121869 - DNA, 25 bp, Homo sapien
gtccacctacacttgatgtcaagga

SEQ ID NO: 121870 - DNA, 25 bp, Homo sapien
gtccacctacacatgatgtcaagga

SEQ ID NO: 121871 - DNA, 25 bp, Homo sapien
ttcacctaccacagcttcgacagga

SEQ ID NO: 121872 - DNA, 25 bp, Homo sapien
ttcacctaccactgcttcgacagga

SEQ ID NO: 121873 - DNA, 25 bp, Homo sapien
gggtggaacgttgtccttctttgta

SEQ ID NO: 121874 - DNA, 25 bp, Homo sapien
gggtggaacgttctccttctttgta

SEQ ID NO: 121875 - DNA, 25 bp, Homo sapien
ggtactggtgcttcccttccttctt

SEQ ID NO: 121876 - DNA, 25 bp, Homo sapien
ggtactggtgctacccttccttctt

SEQ ID NO: 121877 - DNA, 25 bp, Homo sapien
ccgtgtagtgagtgattttcctttt

SEQ ID NO: 121878 - DNA, 25 bp, Homo sapien
ccgtgtagtgagagattttcctttt

SEQ ID NO: 121879 - DNA, 25 bp, Homo sapien
catgtgtattgtttcctaatcgtga

SEQ ID NO: 121880 - DNA, 25 bp, Homo sapien
catgtgtattgtatcctaatcgtga

SEQ ID NO: 121881 - DNA, 25 bp, Homo sapien
actgtgattagtactaccaaaggtg

SEQ ID NO: 121882 - DNA, 25 bp, Homo sapien
actgtgattagttctaccaaaggtg

SEQ ID NO: 121883 - DNA, 25 bp, Homo sapien
gtcccaggttcctcggggtacgtcg

SEQ ID NO: 121884 - DNA, 25 bp, Homo sapien
gtcccaggttccacggggtacgtcg

SEQ ID NO: 121885 - DNA, 25 bp, Homo sapien
attccttcggccacttatcgttacg

SEQ ID NO: 121886 - DNA, 25 bp, Homo sapien
attccttcggcctcttatcgttacg

SEQ ID NO: 121887 - DNA, 25 bp, Homo sapien
cgtttttccccatcttatgtctgtg

SEQ ID NO: 121888 - DNA, 25 bp, Homo sapien
cgtttttccccaacttatgtctgtg

SEQ ID NO: 121889 - DNA, 25 bp, Homo sapien
tctttactgccctacttagggtctg

SEQ ID NO: 121890 - DNA, 25 bp, Homo sapien
tctttactgcccaacttagggtctg

SEQ ID NO: 121891 - DNA, 25 bp, Homo sapien
cttcgtaccctactcctaggtccgg

SEQ ID NO: 121892 - DNA, 25 bp, Homo sapien
cttcgtaccctagtcctaggtccgg

SEQ ID NO: 121893 - DNA, 25 bp, Homo sapien
cttcctttcacttcgtagagttccg

SEQ ID NO: 121894 - DNA, 25 bp, Homo sapien
cttcctttcactacgtagagttccg

SEQ ID NO: 121895 - DNA, 25 bp, Homo sapien
ctctagttagtcttcgagtattcta

SEQ ID NO: 121896 - DNA, 25 bp, Homo sapien
ctctagttagtcatcgagtattcta

SEQ ID NO: 121897 - DNA, 25 bp, Homo sapien
ttcaacactagtctcttttgttgtg

SEQ ID NO: 121898 - DNA, 25 bp, Homo sapien
ttcaacactagtgtcttttgttgtg

SEQ ID NO: 121899 - DNA, 25 bp, Homo sapien
ctcaaacattgtagattaccggtat

SEQ ID NO: 121900 - DNA, 25 bp, Homo sapien
ctcaaacattgttgattaccggtat

SEQ ID NO: 121901 - DNA, 25 bp, Homo sapien
aacagaggtgtcataacttctggtc

SEQ ID NO: 121902 - DNA, 25 bp, Homo sapien
aacagaggtgtcttaacttctggtc

SEQ ID NO: 121903 - DNA, 25 bp, Homo sapien
aaaaatagggattcacctgtaggtc

SEQ ID NO: 121904 - DNA, 25 bp, Homo sapien
aaaaatagggatacacctgtaggtc

SEQ ID NO: 121905 - DNA, 25 bp, Homo sapien
aaaaggggttcgacgattgaaccgt

SEQ ID NO: 121906 - DNA, 25 bp, Homo sapien
aaaaggggttcgtcgattgaaccgt

SEQ ID NO: 121907 - DNA, 25 bp, Homo sapien
aacgaagggtttcctcgtttgaaac

SEQ ID NO: 121908 - DNA, 25 bp, Homo sapien
aacgaagggtttgctcgtttgaaac

SEQ ID NO: 121909 - DNA, 25 bp, Homo sapien
aatagcgtgtgttgcactccttcaa

SEQ ID NO: 121910 - DNA, 25 bp, Homo sapien
aatagcgtgtgtagcactccttcaa

SEQ ID NO: 121911 - DNA, 25 bp, Homo sapien
ctttggtgtacctcacgtctcgatt

SEQ ID NO: 121912 - DNA, 25 bp, Homo sapien
ctttggtgtaccacacgtctcgatt

SEQ ID NO: 121913 - DNA, 25 bp, Homo sapien
cggtgtttcccgacagtcgtcgatc

SEQ ID NO: 121914 - DNA, 25 bp, Homo sapien
cggtgtttcccgtcagtcgtcgatc

SEQ ID NO: 121915 - DNA, 25 bp, Homo sapien
cgactatttctctgatcagtgtgga

SEQ ID NO: 121916 - DNA, 25 bp, Homo sapien
cgactatttctcagatcagtgtgga

SEQ ID NO: 121917 - DNA, 25 bp, Homo sapien
tgtcaagagttcaggcaggtctcac

SEQ ID NO: 121918 - DNA, 25 bp, Homo sapien
tgtcaagagttctggcaggtctcac

SEQ ID NO: 121919 - DNA, 25 bp, Homo sapien
ctgacgtaaaggtttttagaccata

SEQ ID NO: 121920 - DNA, 25 bp, Homo sapien
ctgacgtaaaggattttagaccata

SEQ ID NO: 121921 - DNA, 25 bp, Homo sapien
aacagaggtgatattagaacctacg

SEQ ID NO: 121922 - DNA, 25 bp, Homo sapien
aacagaggtgattttagaacctacg

SEQ ID NO: 121923 - DNA, 25 bp, Homo sapien
agatcgttcttgttttcgcttacgt

SEQ ID NO: 121924 - DNA, 25 bp, Homo sapien
agatcgttcttgatttcgcttacgt

SEQ ID NO: 121925 - DNA, 25 bp, Homo sapien
ctcagtgtctatggattcgatctct

SEQ ID NO: 121926 - DNA, 25 bp, Homo sapien
ctcagtgtctatcgattcgatctct

SEQ ID NO: 121927 - DNA, 25 bp, Homo sapien
cactctggtctacgatgtcgtttac

SEQ ID NO: 121928 - DNA, 25 bp, Homo sapien
cactctggtctaggatgtcgtttac

SEQ ID NO: 121929 - DNA, 25 bp, Homo sapien
gactcgagaaacgacttcgtcttct

SEQ ID NO: 121930 - DNA, 25 bp, Homo sapien
gactcgagaaaccacttcgtcttct

SEQ ID NO: 121931 - DNA, 25 bp, Homo sapien
aagtcgattataacgtcttgattac

SEQ ID NO: 121932 - DNA, 25 bp, Homo sapien
aagtcgattatatcgtcttgattac

SEQ ID NO: 121933 - DNA, 25 bp, Homo sapien
aaacccgtctcaatttggactgtat

SEQ ID NO: 121934 - DNA, 25 bp, Homo sapien
aaacccgtctcattttggactgtat

SEQ ID NO: 121935 - DNA, 25 bp, Homo sapien
tttttacctctcctgtttggaggtc

SEQ ID NO: 121936 - DNA, 25 bp, Homo sapien
tttttacctctcgtgtttggaggtc

SEQ ID NO: 121937 - DNA, 25 bp, Homo sapien
tttactgtacgtttggttgggtctc

SEQ ID NO: 121938 - DNA, 25 bp, Homo sapien
tttactgtacgtatggttgggtctc

SEQ ID NO: 121939 - DNA, 25 bp, Homo sapien
gactcacgtcacctctctgtgattt

SEQ ID NO: 121940 - DNA, 25 bp, Homo sapien
gactcacgtcacgtctctgtgattt

SEQ ID NO: 121941 - DNA, 25 bp, Homo sapien
gatcgttacgtcttacttatgattt

SEQ ID NO: 121942 - DNA, 25 bp, Homo sapien
gatcgttacgtcatacttatgattt

SEQ ID NO: 121943 - DNA, 25 bp, Homo sapien
ccggtagtcactctagctttattat

SEQ ID NO: 121944 - DNA, 25 bp, Homo sapien
ccggtagtcactgtagctttattat

SEQ ID NO: 121945 - DNA, 25 bp, Homo sapien
actacccggggtttagatcttgggc

SEQ ID NO: 121946 - DNA, 25 bp, Homo sapien
actacccggggtatagatcttgggc

SEQ ID NO: 121947 - DNA, 25 bp, Homo sapien
cacccggtcgggaaccctgtgagga

SEQ ID NO: 121948 - DNA, 25 bp, Homo sapien
cacccggtcgggtaccctgtgagga

SEQ ID NO: 121949 - DNA, 25 bp, Homo sapien
acgctctccggtgctattgacgtga

SEQ ID NO: 121950 - DNA, 25 bp, Homo sapien
acgctctccggtcctattgacgtga

SEQ ID NO: 121951 - DNA, 25 bp, Homo sapien
agaaacgactgacattacatgacgt

SEQ ID NO: 121952 - DNA, 25 bp, Homo sapien
agaaacgactgagattacatgacgt

SEQ ID NO: 121953 - DNA, 25 bp, Homo sapien
aagttgtccctacctgacagtacat

SEQ ID NO: 121954 - DNA, 25 bp, Homo sapien
aagttgtccctagctgacagtacat

SEQ ID NO: 121955 - DNA, 25 bp, Homo sapien
gtcgttagtaaggactgaacgtcat

SEQ ID NO: 121956 - DNA, 25 bp, Homo sapien
gtcgttagtaagcactgaacgtcat

SEQ ID NO: 121957 - DNA, 25 bp, Homo sapien
agtattgacgtgagagatacgtatt

SEQ ID NO: 121958 - DNA, 25 bp, Homo sapien
agtattgacgtgtgagatacgtatt

SEQ ID NO: 121959 - DNA, 25 bp, Homo sapien
cacgatattctacgtcgtgatttat

SEQ ID NO: 121960 - DNA, 25 bp, Homo sapien
cacgatattctaggtcgtgatttat

SEQ ID NO: 121961 - DNA, 25 bp, Homo sapien
gtcgagttcgttaaacgctaggttt

SEQ ID NO: 121962 - DNA, 25 bp, Homo sapien
gtcgagttcgtttaacgctaggttt

SEQ ID NO: 121963 - DNA, 25 bp, Homo sapien
cgtcggtcttgtcatagaaatcagt

SEQ ID NO: 121964 - DNA, 25 bp, Homo sapien
cgtcggtcttgtgatagaaatcagt

SEQ ID NO: 121965 - DNA, 25 bp, Homo sapien
gacttctcttgtgagaccagtccac

SEQ ID NO: 121966 - DNA, 25 bp, Homo sapien
gacttctcttgtcagaccagtccac

SEQ ID NO: 121967 - DNA, 25 bp, Homo sapien
ttatggcttggtgagtgcgacgaca

SEQ ID NO: 121968 - DNA, 25 bp, Homo sapien
ttatggcttggtcagtgcgacgaca

SEQ ID NO: 121969 - DNA, 25 bp, Homo sapien
tagacgagtcactctcgggtcctta

SEQ ID NO: 121970 - DNA, 25 bp, Homo sapien
tagacgagtcacactcgggtcctta

SEQ ID NO: 121971 - DNA, 25 bp, Homo sapien
cgaacacttatccacggtcacttta

SEQ ID NO: 121972 - DNA, 25 bp, Homo sapien
cgaacacttatcgacggtcacttta

SEQ ID NO: 121973 - DNA, 25 bp, Homo sapien
gtttcaatgacagttcaactgtcat

SEQ ID NO: 121974 - DNA, 25 bp, Homo sapien
gtttcaatgacacttcaactgtcat

SEQ ID NO: 121975 - DNA, 25 bp, Homo sapien
tgtcatgtcctgatttacaccgttg

SEQ ID NO: 121976 - DNA, 25 bp, Homo sapien
tgtcatgtcctgttttacaccgttg

SEQ ID NO: 121977 - DNA, 25 bp, Homo sapien
gagagtctcccctttttctactttg

SEQ ID NO: 121978 - DNA, 25 bp, Homo sapien
gagagtctccccattttctactttg

SEQ ID NO: 121979 - DNA, 25 bp, Homo sapien
gtgtttgatccatttacacccagta

SEQ ID NO: 121980 - DNA, 25 bp, Homo sapien
gtgtttgatccaattacacccagta

SEQ ID NO: 121981 - DNA, 25 bp, Homo sapien
gagggcaccgtccaattccctgaca

SEQ ID NO: 121982 - DNA, 25 bp, Homo sapien
gagggcaccgtcgaattccctgaca

SEQ ID NO: 121983 - DNA, 25 bp, Homo sapien
ggaccccgtagtcaggtgtcctcca

SEQ ID NO: 121984 - DNA, 25 bp, Homo sapien
ggaccccgtagtgaggtgtcctcca

SEQ ID NO: 121985 - DNA, 25 bp, Homo sapien
gacggctgtcgttggacccacgacc

SEQ ID NO: 121986 - DNA, 25 bp, Homo sapien
gacggctgtcgtaggacccacgacc

SEQ ID NO: 121987 - DNA, 25 bp, Homo sapien
taaggtctactttgggccgagacgc

SEQ ID NO: 121988 - DNA, 25 bp, Homo sapien
taaggtctacttagggccgagacgc

SEQ ID NO: 121989 - DNA, 25 bp, Homo sapien
cacagttactagtggggtcttaggc

SEQ ID NO: 121990 - DNA, 25 bp, Homo sapien
cacagttactagaggggtcttaggc

SEQ ID NO: 121991 - DNA, 25 bp, Homo sapien
cgtctactatctccaggtgtcagga

SEQ ID NO: 121992 - DNA, 25 bp, Homo sapien
cgtctactatctgcaggtgtcagga

SEQ ID NO: 121993 - DNA, 25 bp, Homo sapien
gtggtactaaactccgatgactcca

SEQ ID NO: 121994 - DNA, 25 bp, Homo sapien
gtggtactaaacaccgatgactcca

SEQ ID NO: 121995 - DNA, 25 bp, Homo sapien
acggtggagtcaccatgaattacga

SEQ ID NO: 121996 - DNA, 25 bp, Homo sapien
acggtggagtcagcatgaattacga

SEQ ID NO: 121997 - DNA, 25 bp, Homo sapien
cacctcggatcctaagaagtctatc

SEQ ID NO: 121998 - DNA, 25 bp, Homo sapien
cacctcggatccaaagaagtctatc

SEQ ID NO: 121999 - DNA, 25 bp, Homo sapien
gagaggacaacaagagtaacttcgc

SEQ ID NO: 122000 - DNA, 25 bp, Homo sapien
gagaggacaacatgagtaacttcgc

SEQ ID NO: 122001 - DNA, 25 bp, Homo sapien
ggagaaggaaatcacgttgtaccgc

SEQ ID NO: 122002 - DNA, 25 bp, Homo sapien
ggagaaggaaatgacgttgtaccgc

SEQ ID NO: 122003 - DNA, 25 bp, Homo sapien
gtcactcaagattgtcgtgttcacc

SEQ ID NO: 122004 - DNA, 25 bp, Homo sapien
gtcactcaagatagtcgtgttcacc

SEQ ID NO: 122005 - DNA, 25 bp, Homo sapien
tgttacttgtgaggaggtaatcctc

SEQ ID NO: 122006 - DNA, 25 bp, Homo sapien
tgttacttgtgacgaggtaatcctc

SEQ ID NO: 122007 - DNA, 25 bp, Homo sapien
ggtcctgtttacgactgaaaccgta

SEQ ID NO: 122008 - DNA, 25 bp, Homo sapien
ggtcctgtttaccactgaaaccgta

SEQ ID NO: 122009 - DNA, 25 bp, Homo sapien
gagacggtgaaatggaggaaccaca

SEQ ID NO: 122010 - DNA, 25 bp, Homo sapien
gagacggtgaaaaggaggaaccaca

SEQ ID NO: 122011 - DNA, 25 bp, Homo sapien
cgagggagaacttgaggtccccctt

SEQ ID NO: 122012 - DNA, 25 bp, Homo sapien
cgagggagaactagaggtccccctt

SEQ ID NO: 122013 - DNA, 25 bp, Homo sapien
ccgaaggaccgaagagaccttattt

SEQ ID NO: 122014 - DNA, 25 bp, Homo sapien
ccgaaggaccgatgagaccttattt

SEQ ID NO: 122015 - DNA, 25 bp, Homo sapien
gtcaaataatgacgtcgaccattga

SEQ ID NO: 122016 - DNA, 25 bp, Homo sapien
gtcaaataatgaggtcgaccattga

SEQ ID NO: 122017 - DNA, 25 bp, Homo sapien
tccaaaaatggttgtgtcactaatg

SEQ ID NO: 122018 - DNA, 25 bp, Homo sapien
tccaaaaatggtagtgtcactaatg

SEQ ID NO: 122019 - DNA, 25 bp, Homo sapien
gagaaattttgttaacgacgacacg

SEQ ID NO: 122020 - DNA, 25 bp, Homo sapien
gagaaattttgtaaacgacgacacg

SEQ ID NO: 122021 - DNA, 25 bp, Homo sapien
ccgggtaccagacatcaaacaactc

SEQ ID NO: 122022 - DNA, 25 bp, Homo sapien
ccgggtaccagagatcaaacaactc

SEQ ID NO: 122023 - DNA, 25 bp, Homo sapien
tcggccgcccggttcataacgtgaa

SEQ ID NO: 122024 - DNA, 25 bp, Homo sapien
tcggccgcccggatcataacgtgaa

SEQ ID NO: 122025 - DNA, 25 bp, Homo sapien
ttaggtttacggacattatgtcgta

SEQ ID NO: 122026 - DNA, 25 bp, Homo sapien
ttaggtttacggtcattatgtcgta

SEQ ID NO: 122027 - DNA, 25 bp, Homo sapien
taggagttcctgacggactagagtc

SEQ ID NO: 122028 - DNA, 25 bp, Homo sapien
taggagttcctgtcggactagagtc

SEQ ID NO: 122029 - DNA, 25 bp, Homo sapien
atgactataagacacggtacaacag

SEQ ID NO: 122030 - DNA, 25 bp, Homo sapien
atgactataagagacggtacaacag

SEQ ID NO: 122031 - DNA, 25 bp, Homo sapien
gagtgctcgcattccgttagaagac

SEQ ID NO: 122032 - DNA, 25 bp, Homo sapien
gagtgctcgcataccgttagaagac

SEQ ID NO: 122033 - DNA, 25 bp, Homo sapien
actatgtttcatcacttttcgtgac

SEQ ID NO: 122034 - DNA, 25 bp, Homo sapien
actatgtttcatgacttttcgtgac

SEQ ID NO: 122035 - DNA, 25 bp, Homo sapien
cacgggtttcgagacttttaggact

SEQ ID NO: 122036 - DNA, 25 bp, Homo sapien
cacgggtttcgacacttttaggact

SEQ ID NO: 122037 - DNA, 25 bp, Homo sapien
ctcgaaggttcctttcggtttaggg

SEQ ID NO: 122038 - DNA, 25 bp, Homo sapien
ctcgaaggttccattcggtttaggg

SEQ ID NO: 122039 - DNA, 25 bp, Homo sapien
cgagacggaagacttctgtattgga

SEQ ID NO: 122040 - DNA, 25 bp, Homo sapien
cgagacggaagagttctgtattgga

SEQ ID NO: 122041 - DNA, 25 bp, Homo sapien
ccagtgcactgtgtcttgtactttg

SEQ ID NO: 122042 - DNA, 25 bp, Homo sapien
ccagtgcactgtctcttgtactttg

SEQ ID NO: 122043 - DNA, 25 bp, Homo sapien
ggtgggtattgatccttcttttcgt

SEQ ID NO: 122044 - DNA, 25 bp, Homo sapien
ggtgggtattgaaccttcttttcgt

SEQ ID NO: 122045 - DNA, 25 bp, Homo sapien
ggagtcgtttataacctttatcttt

SEQ ID NO: 122046 - DNA, 25 bp, Homo sapien
ggagtcgtttattacctttatcttt

SEQ ID NO: 122047 - DNA, 25 bp, Homo sapien
gtcaagtaacttatagacgtacaat

SEQ ID NO: 122048 - DNA, 25 bp, Homo sapien
gtcaagtaacttttagacgtacaat

SEQ ID NO: 122049 - DNA, 25 bp, Homo sapien
gtcggagtcacttcagtaccgttca

SEQ ID NO: 122050 - DNA, 25 bp, Homo sapien
gtcggagtcactacagtaccgttca

SEQ ID NO: 122051 - DNA, 25 bp, Homo sapien
gctcgggcgtcgaacaactcttaca

SEQ ID NO: 122052 - DNA, 25 bp, Homo sapien
gctcgggcgtcgtacaactcttaca

SEQ ID NO: 122053 - DNA, 25 bp, Homo sapien
aaacaacttgggtttcactatgata

SEQ ID NO: 122054 - DNA, 25 bp, Homo sapien
aaacaacttgggattcactatgata

SEQ ID NO: 122055 - DNA, 25 bp, Homo sapien
tcggaagagcgagtctacggtagaa

SEQ ID NO: 122056 - DNA, 25 bp, Homo sapien
tcggaagagcgactctacggtagaa

SEQ ID NO: 122057 - DNA, 25 bp, Homo sapien
cgtttaccgaaaacacttttgtgaa

SEQ ID NO: 122058 - DNA, 25 bp, Homo sapien
cgtttaccgaaatcacttttgtgaa

SEQ ID NO: 122059 - DNA, 25 bp, Homo sapien
ctgagaatgtactcaaatgtcaatt

SEQ ID NO: 122060 - DNA, 25 bp, Homo sapien
ctgagaatgtacacaaatgtcaatt

SEQ ID NO: 122061 - DNA, 25 bp, Homo sapien
tttaagtaaaaccaggttcaagtac

SEQ ID NO: 122062 - DNA, 25 bp, Homo sapien
tttaagtaaaacgaggttcaagtac

SEQ ID NO: 122063 - DNA, 25 bp, Homo sapien
gctcatacaaaggtcgttatcaatc

SEQ ID NO: 122064 - DNA, 25 bp, Homo sapien
gctcatacaaagctcgttatcaatc

SEQ ID NO: 122065 - DNA, 25 bp, Homo sapien
agtagtaggagaggtcatcgttcac

SEQ ID NO: 122066 - DNA, 25 bp, Homo sapien
agtagtaggagacgtcatcgttcac

SEQ ID NO: 122067 - DNA, 25 bp, Homo sapien
ttggaaaccggacctaatagtagcc

SEQ ID NO: 122068 - DNA, 25 bp, Homo sapien
ttggaaaccggagctaatagtagcc

SEQ ID NO: 122069 - DNA, 25 bp, Homo sapien
aatgaaaacaggttcaacactgttg

SEQ ID NO: 122070 - DNA, 25 bp, Homo sapien
aatgaaaacaggatcaacactgttg

SEQ ID NO: 122071 - DNA, 25 bp, Homo sapien
gtgcaactacagacagaccaagtcc

SEQ ID NO: 122072 - DNA, 25 bp, Homo sapien
gtgcaactacagtcagaccaagtcc

SEQ ID NO: 122073 - DNA, 25 bp, Homo sapien
tatagaaatatggttgtcccatccg

SEQ ID NO: 122074 - DNA, 25 bp, Homo sapien
tatagaaatatgcttgtcccatccg

SEQ ID NO: 122075 - DNA, 25 bp, Homo sapien
tttactacatgtgcatgtcccaggg

SEQ ID NO: 122076 - DNA, 25 bp, Homo sapien
tttactacatgtccatgtcccaggg

SEQ ID NO: 122077 - DNA, 25 bp, Homo sapien
attatcctgtccaggtccctcgagg

SEQ ID NO: 122078 - DNA, 25 bp, Homo sapien
attatcctgtcctggtccctcgagg

SEQ ID NO: 122079 - DNA, 25 bp, Homo sapien
cagttttctgacctcgaaaagggac

SEQ ID NO: 122080 - DNA, 25 bp, Homo sapien
cagttttctgacgtcgaaaagggac

SEQ ID NO: 122081 - DNA, 25 bp, Homo sapien
attctgtctagttaccattaccaaa

SEQ ID NO: 122082 - DNA, 25 bp, Homo sapien
attctgtctagtaaccattaccaaa

SEQ ID NO: 122083 - DNA, 25 bp, Homo sapien
aattgcctaggacactacaccgcca

SEQ ID NO: 122084 - DNA, 25 bp, Homo sapien
aattgcctaggagactacaccgcca

SEQ ID NO: 122085 - DNA, 25 bp, Homo sapien
tgttgtcacatcagaaacccctgtg

SEQ ID NO: 122086 - DNA, 25 bp, Homo sapien
tgttgtcacatctgaaacccctgtg

SEQ ID NO: 122087 - DNA, 25 bp, Homo sapien
tagttgtatatgtaaatctcccttg

SEQ ID NO: 122088 - DNA, 25 bp, Homo sapien
tagttgtatatgaaaatctcccttg

SEQ ID NO: 122089 - DNA, 25 bp, Homo sapien
tttagggaacgttaagtccatcagt

SEQ ID NO: 122090 - DNA, 25 bp, Homo sapien
tttagggaacgtaaagtccatcagt

SEQ ID NO: 122091 - DNA, 25 bp, Homo sapien
tggagcactacaaccgacacctcat

SEQ ID NO: 122092 - DNA, 25 bp, Homo sapien
tggagcactacatccgacacctcat

SEQ ID NO: 122093 - DNA, 25 bp, Homo sapien
tgtcagtccatgaagacgaagtcca

SEQ ID NO: 122094 - DNA, 25 bp, Homo sapien
tgtcagtccatgtagacgaagtcca

SEQ ID NO: 122095 - DNA, 25 bp, Homo sapien
tcctcataccttacctcggaaacgg

SEQ ID NO: 122096 - DNA, 25 bp, Homo sapien
tcctcatacctttcctcggaaacgg

SEQ ID NO: 122097 - DNA, 25 bp, Homo sapien
gccacgtggcagaggtgctttaagt

SEQ ID NO: 122098 - DNA, 25 bp, Homo sapien
gccacgtggcagtggtgctttaagt

SEQ ID NO: 122099 - DNA, 25 bp, Homo sapien
gttccggttgatgtggaccactcgg

SEQ ID NO: 122100 - DNA, 25 bp, Homo sapien
gttccggttgatctggaccactcgg

SEQ ID NO: 122101 - DNA, 25 bp, Homo sapien
ccgactcgtatgtaaaggggccccc

SEQ ID NO: 122102 - DNA, 25 bp, Homo sapien
ccgactcgtatgaaaaggggccccc

SEQ ID NO: 122103 - DNA, 25 bp, Homo sapien
gaccttcctatccaagtagggccac

SEQ ID NO: 122104 - DNA, 25 bp, Homo sapien
gaccttcctatcgaagtagggccac

SEQ ID NO: 122105 - DNA, 25 bp, Homo sapien
aaccgtttgtttcaatgaagtccac

SEQ ID NO: 122106 - DNA, 25 bp, Homo sapien
aaccgtttgtttgaatgaagtccac

SEQ ID NO: 122107 - DNA, 25 bp, Homo sapien
agcttttcagagattccatagtgac

SEQ ID NO: 122108 - DNA, 25 bp, Homo sapien
agcttttcagagtttccatagtgac

SEQ ID NO: 122109 - DNA, 25 bp, Homo sapien
tcttcccacagtttcccagtcgagt

SEQ ID NO: 122110 - DNA, 25 bp, Homo sapien
tcttcccacagtatcccagtcgagt

SEQ ID NO: 122111 - DNA, 25 bp, Homo sapien
cgtacttcttcacgtccgctccttt

SEQ ID NO: 122112 - DNA, 25 bp, Homo sapien
cgtacttcttcaggtccgctccttt

SEQ ID NO: 122113 - DNA, 25 bp, Homo sapien
tagacctgtcccttcctacgggcgt

SEQ ID NO: 122114 - DNA, 25 bp, Homo sapien
tagacctgtcccatcctacgggcgt

SEQ ID NO: 122115 - DNA, 25 bp, Homo sapien
taaattcgacccttactgagtgtct

SEQ ID NO: 122116 - DNA, 25 bp, Homo sapien
taaattcgacccatactgagtgtct

SEQ ID NO: 122117 - DNA, 25 bp, Homo sapien
caagacggtgacgtccagggatcgt

SEQ ID NO: 122118 - DNA, 25 bp, Homo sapien
caagacggtgacctccagggatcgt

SEQ ID NO: 122119 - DNA, 25 bp, Homo sapien
agtcaaaccagactcctatgtgttc

SEQ ID NO: 122120 - DNA, 25 bp, Homo sapien
agtcaaaccagagtcctatgtgttc

SEQ ID NO: 122121 - DNA, 25 bp, Homo sapien
tggaaacaatgtcgtaactgtctac

SEQ ID NO: 122122 - DNA, 25 bp, Homo sapien
tggaaacaatgtggtaactgtctac

SEQ ID NO: 122123 - DNA, 25 bp, Homo sapien
agagtaacgccgtgtggtcatgtcc

SEQ ID NO: 122124 - DNA, 25 bp, Homo sapien
agagtaacgccgagtggtcatgtcc

SEQ ID NO: 122125 - DNA, 25 bp, Homo sapien
actttatgtgtgtctcctaaattgt

SEQ ID NO: 122126 - DNA, 25 bp, Homo sapien
actttatgtgtgactcctaaattgt

SEQ ID NO: 122127 - DNA, 25 bp, Homo sapien
ggtcccgagtgacacgccactgacg

SEQ ID NO: 122128 - DNA, 25 bp, Homo sapien
ggtcccgagtgagacgccactgacg

SEQ ID NO: 122129 - DNA, 25 bp, Homo sapien
tggtcccggtttgactcgtctcaga

SEQ ID NO: 122130 - DNA, 25 bp, Homo sapien
tggtcccggtttcactcgtctcaga

SEQ ID NO: 122131 - DNA, 25 bp, Homo sapien
tccgtacacaggttttctgttaatc

SEQ ID NO: 122132 - DNA, 25 bp, Homo sapien
tccgtacacaggatttctgttaatc

SEQ ID NO: 122133 - DNA, 25 bp, Homo sapien
aagaatctgattttcgtatgacgtc

SEQ ID NO: 122134 - DNA, 25 bp, Homo sapien
aagaatctgattatcgtatgacgtc

SEQ ID NO: 122135 - DNA, 25 bp, Homo sapien
ctcaagtgtatgtgtgtaattccaa

SEQ ID NO: 122136 - DNA, 25 bp, Homo sapien
ctcaagtgtatgagtgtaattccaa

SEQ ID NO: 122137 - DNA, 25 bp, Homo sapien
agatgtgatggtggacttcttcaac

SEQ ID NO: 122138 - DNA, 25 bp, Homo sapien
agatgtgatggtcgacttcttcaac

SEQ ID NO: 122139 - DNA, 25 bp, Homo sapien
caccagaagccgacgaaccattaat

SEQ ID NO: 122140 - DNA, 25 bp, Homo sapien
caccagaagccgtcgaaccattaat

SEQ ID NO: 122141 - DNA, 25 bp, Homo sapien
tgggagttaccgttgaccacttgcc

SEQ ID NO: 122142 - DNA, 25 bp, Homo sapien
tgggagttaccgatgaccacttgcc

SEQ ID NO: 122143 - DNA, 25 bp, Homo sapien
aaaccactaacgtctgatacatata

SEQ ID NO: 122144 - DNA, 25 bp, Homo sapien
aaaccactaacgactgatacatata

SEQ ID NO: 122145 - DNA, 25 bp, Homo sapien
aaatgttaccggacactgtttatat

SEQ ID NO: 122146 - DNA, 25 bp, Homo sapien
aaatgttaccggtcactgtttatat

SEQ ID NO: 122147 - DNA, 25 bp, Homo sapien
ttaagttgtggcaatacaccattta

SEQ ID NO: 122148 - DNA, 25 bp, Homo sapien
ttaagttgtggctatacaccattta

SEQ ID NO: 122149 - DNA, 25 bp, Homo sapien
agtgtgtagttcacattccactttt

SEQ ID NO: 122150 - DNA, 25 bp, Homo sapien
agtgtgtagttctcattccactttt

SEQ ID NO: 122151 - DNA, 25 bp, Homo sapien
gtcgagtctcaactccgtcgtataa

SEQ ID NO: 122152 - DNA, 25 bp, Homo sapien
gtcgagtctcaagtccgtcgtataa

SEQ ID NO: 122153 - DNA, 25 bp, Homo sapien
gtcgaggttcattcagtcgacgtca

SEQ ID NO: 122154 - DNA, 25 bp, Homo sapien
gtcgaggttcatacagtcgacgtca

SEQ ID NO: 122155 - DNA, 25 bp, Homo sapien
attgaaattcctaccgtcgtagtaa

SEQ ID NO: 122156 - DNA, 25 bp, Homo sapien
attgaaattccttccgtcgtagtaa

SEQ ID NO: 122157 - DNA, 25 bp, Homo sapien
tttagatattatacaacctacggga

SEQ ID NO: 122158 - DNA, 25 bp, Homo sapien
tttagatattattcaacctacggga

SEQ ID NO: 122159 - DNA, 25 bp, Homo sapien
cttgacatattggtcgatctaagga

SEQ ID NO: 122160 - DNA, 25 bp, Homo sapien
cttgacatattgctcgatctaagga

SEQ ID NO: 122161 - DNA, 25 bp, Homo sapien
tcttggaacgtttcggaacttcgga

SEQ ID NO: 122162 - DNA, 25 bp, Homo sapien
tcttggaacgttacggaacttcgga

SEQ ID NO: 122163 - DNA, 25 bp, Homo sapien
gtttggatacattgggactagtccc

SEQ ID NO: 122164 - DNA, 25 bp, Homo sapien
gtttggatacatagggactagtccc

SEQ ID NO: 122165 - DNA, 25 bp, Homo sapien
taacagtcctttcgaaaagtcaccg

SEQ ID NO: 122166 - DNA, 25 bp, Homo sapien
taacagtcctttggaaaagtcaccg

SEQ ID NO: 122167 - DNA, 25 bp, Homo sapien
agagatgagtttctgaagagaccct

SEQ ID NO: 122168 - DNA, 25 bp, Homo sapien
agagatgagtttgtgaagagaccct

SEQ ID NO: 122169 - DNA, 25 bp, Homo sapien
aataagtactctgtgtggtcacacc

SEQ ID NO: 122170 - DNA, 25 bp, Homo sapien
aataagtactctctgtggtcacacc

SEQ ID NO: 122171 - DNA, 25 bp, Homo sapien
aaccagacgaactcctgtggccacc

SEQ ID NO: 122172 - DNA, 25 bp, Homo sapien
aaccagacgaacacctgtggccacc

SEQ ID NO: 122173 - DNA, 25 bp, Homo sapien
ccgtgtcgaagtcgtcccgtggccc

SEQ ID NO: 122174 - DNA, 25 bp, Homo sapien
ccgtgtcgaagtggtcccgtggccc

SEQ ID NO: 122175 - DNA, 25 bp, Homo sapien
tctcgggatccctgtccggtaaagt

SEQ ID NO: 122176 - DNA, 25 bp, Homo sapien
tctcgggatcccagtccggtaaagt

SEQ ID NO: 122177 - DNA, 25 bp, Homo sapien
ccaggagaggcccgagccctcatcg

SEQ ID NO: 122178 - DNA, 25 bp, Homo sapien
ccaggagaggccggagccctcatcg

SEQ ID NO: 122179 - DNA, 25 bp, Homo sapien
caggagaggcccgagccctcatcgt

SEQ ID NO: 122180 - DNA, 25 bp, Homo sapien
caggagaggccccagccctcatcgt

SEQ ID NO: 122181 - DNA, 25 bp, Homo sapien
gggagggtcatcgacacgttgatgt

SEQ ID NO: 122182 - DNA, 25 bp, Homo sapien
gggagggtcatccacacgttgatgt

SEQ ID NO: 122183 - DNA, 25 bp, Homo sapien
acgagacagtggacccacaataatg

SEQ ID NO: 122184 - DNA, 25 bp, Homo sapien
acgagacagtggtcccacaataatg

SEQ ID NO: 122185 - DNA, 25 bp, Homo sapien
caaacaggttgtctcatattagttc

SEQ ID NO: 122186 - DNA, 25 bp, Homo sapien
caaacaggttgtgtcatattagttc

SEQ ID NO: 122187 - DNA, 25 bp, Homo sapien
cgagaaatttctactttttagtgac

SEQ ID NO: 122188 - DNA, 25 bp, Homo sapien
cgagaaatttcttctttttagtgac

SEQ ID NO: 122189 - DNA, 25 bp, Homo sapien
acactcgacatgttgtggttttggt

SEQ ID NO: 122190 - DNA, 25 bp, Homo sapien
acactcgacatgatgtggttttggt

SEQ ID NO: 122191 - DNA, 25 bp, Homo sapien
cgtcgtcgcatgtaatcattaatat

SEQ ID NO: 122192 - DNA, 25 bp, Homo sapien
cgtcgtcgcatgaaatcattaatat

SEQ ID NO: 122193 - DNA, 25 bp, Homo sapien
gctcgtttgtactgagaagcttgtc

SEQ ID NO: 122194 - DNA, 25 bp, Homo sapien
gctcgtttgtacagagaagcttgtc

SEQ ID NO: 122195 - DNA, 25 bp, Homo sapien
ctctctctctaaggtccatctatcg

SEQ ID NO: 122196 - DNA, 25 bp, Homo sapien
ctctctctctaacgtccatctatcg

SEQ ID NO: 122197 - DNA, 25 bp, Homo sapien
tgttattctccaaatcggtaacttg

SEQ ID NO: 122198 - DNA, 25 bp, Homo sapien
tgttattctccatatcggtaacttg

SEQ ID NO: 122199 - DNA, 25 bp, Homo sapien
aaaaagttccgacgtcttcgtgggg

SEQ ID NO: 122200 - DNA, 25 bp, Homo sapien
aaaaagttccgaggtcttcgtgggg

SEQ ID NO: 122201 - DNA, 25 bp, Homo sapien
gagtttcggctgtgttaccgcggag

SEQ ID NO: 122202 - DNA, 25 bp, Homo sapien
gagtttcggctgagttaccgcggag

SEQ ID NO: 122203 - DNA, 25 bp, Homo sapien
tggaatcttttgtccttaacgggtc

SEQ ID NO: 122204 - DNA, 25 bp, Homo sapien
tggaatcttttgaccttaacgggtc

SEQ ID NO: 122205 - DNA, 25 bp, Homo sapien
ggttttcggtgaaccaacgagggta

SEQ ID NO: 122206 - DNA, 25 bp, Homo sapien
ggttttcggtgatccaacgagggta

SEQ ID NO: 122207 - DNA, 25 bp, Homo sapien
agttagagtagacctaaaaaccagt

SEQ ID NO: 122208 - DNA, 25 bp, Homo sapien
agttagagtagagctaaaaaccagt

SEQ ID NO: 122209 - DNA, 25 bp, Homo sapien
tctcagttccgaggacacgacaggg

SEQ ID NO: 122210 - DNA, 25 bp, Homo sapien
tctcagttccgacgacacgacaggg

SEQ ID NO: 122211 - DNA, 25 bp, Homo sapien
agtgacagtgtaagtccccgaaggg

SEQ ID NO: 122212 - DNA, 25 bp, Homo sapien
agtgacagtgtatgtccccgaaggg

SEQ ID NO: 122213 - DNA, 25 bp, Homo sapien
aacgtccttttcaacccgtcggcgg

SEQ ID NO: 122214 - DNA, 25 bp, Homo sapien
aacgtccttttctacccgtcggcgg

SEQ ID NO: 122215 - DNA, 25 bp, Homo sapien
cttagtacgtctaactccgtccaag

SEQ ID NO: 122216 - DNA, 25 bp, Homo sapien
cttagtacgtcttactccgtccaag

SEQ ID NO: 122217 - DNA, 25 bp, Homo sapien
gaggttcagtatccagatctgaaga

SEQ ID NO: 122218 - DNA, 25 bp, Homo sapien
gaggttcagtatgcagatctgaaga

SEQ ID NO: 122219 - DNA, 25 bp, Homo sapien
agttcgaagaccagtactacttcga

SEQ ID NO: 122220 - DNA, 25 bp, Homo sapien
agttcgaagacctgtactacttcga

SEQ ID NO: 122221 - DNA, 25 bp, Homo sapien
agtaaaacacggaatctttcccgta

SEQ ID NO: 122222 - DNA, 25 bp, Homo sapien
agtaaaacacggtatctttcccgta

SEQ ID NO: 122223 - DNA, 25 bp, Homo sapien
tgatacactccgtatattttccgtg

SEQ ID NO: 122224 - DNA, 25 bp, Homo sapien
tgatacactccgaatattttccgtg

SEQ ID NO: 122225 - DNA, 25 bp, Homo sapien
gtgagtgcgacgacagtattctgac

SEQ ID NO: 122226 - DNA, 25 bp, Homo sapien
gtgagtgcgacgtcagtattctgac

SEQ ID NO: 122227 - DNA, 25 bp, Homo sapien
cggtgagtaccgaccaggacctcct

SEQ ID NO: 122228 - DNA, 25 bp, Homo sapien
cggtgagtaccgtccaggacctcct

SEQ ID NO: 122229 - DNA, 25 bp, Homo sapien
tgtgtagatgtatccatatgtgtcc

SEQ ID NO: 122230 - DNA, 25 bp, Homo sapien
tgtgtagatgtaaccatatgtgtcc

SEQ ID NO: 122231 - DNA, 25 bp, Homo sapien
aacctgtcggggaccggatgtaccc

SEQ ID NO: 122232 - DNA, 25 bp, Homo sapien
aacctgtcggggtccggatgtaccc

SEQ ID NO: 122233 - DNA, 25 bp, Homo sapien
agggtcgagatcttcgtcagtacaa

SEQ ID NO: 122234 - DNA, 25 bp, Homo sapien
agggtcgagatcatcgtcagtacaa

SEQ ID NO: 122235 - DNA, 25 bp, Homo sapien
tactggttactttgatacatagaca

SEQ ID NO: 122236 - DNA, 25 bp, Homo sapien
tactggttacttagatacatagaca

SEQ ID NO: 122237 - DNA, 25 bp, Homo sapien
acggtactcaagttgatatctaaac

SEQ ID NO: 122238 - DNA, 25 bp, Homo sapien
acggtactcaagatgatatctaaac

SEQ ID NO: 122239 - DNA, 25 bp, Homo sapien
cgtgaaccccaaagaagtaccataa

SEQ ID NO: 122240 - DNA, 25 bp, Homo sapien
cgtgaaccccaatgaagtaccataa

SEQ ID NO: 122241 - DNA, 25 bp, Homo sapien
caccctagaggacgtccgactacgg

SEQ ID NO: 122242 - DNA, 25 bp, Homo sapien
caccctagaggaggtccgactacgg

SEQ ID NO: 122243 - DNA, 25 bp, Homo sapien
gcgaaaagaaggacctcggagtcga

SEQ ID NO: 122244 - DNA, 25 bp, Homo sapien
gcgaaaagaaggtcctcggagtcga

SEQ ID NO: 122245 - DNA, 25 bp, Homo sapien
ctcagtgggacaggtcctcaggatg

SEQ ID NO: 122246 - DNA, 25 bp, Homo sapien
ctcagtgggacacgtcctcaggatg

SEQ ID NO: 122247 - DNA, 25 bp, Homo sapien
cgtgtatgattgtaccttcaagatt

SEQ ID NO: 122248 - DNA, 25 bp, Homo sapien
cgtgtatgattgaaccttcaagatt

SEQ ID NO: 122249 - DNA, 25 bp, Homo sapien
ataaatatgacgtcttaactcactg

SEQ ID NO: 122250 - DNA, 25 bp, Homo sapien
ataaatatgacgacttaactcactg

SEQ ID NO: 122251 - DNA, 25 bp, Homo sapien
agaaagattcatctgatactccgtg

SEQ ID NO: 122252 - DNA, 25 bp, Homo sapien
agaaagattcatgtgatactccgtg

SEQ ID NO: 122253 - DNA, 25 bp, Homo sapien
tagtcttagacctatgacttatggt

SEQ ID NO: 122254 - DNA, 25 bp, Homo sapien
tagtcttagaccaatgacttatggt

SEQ ID NO: 122255 - DNA, 25 bp, Homo sapien
tgaaaccttacatcacagtttttgg

SEQ ID NO: 122256 - DNA, 25 bp, Homo sapien
tgaaaccttacaacacagtttttgg

SEQ ID NO: 122257 - DNA, 25 bp, Homo sapien
taggaaagtacaaaatttacttcga

SEQ ID NO: 122258 - DNA, 25 bp, Homo sapien
taggaaagtacataatttacttcga

SEQ ID NO: 122259 - DNA, 25 bp, Homo sapien
cgtcgtaaccggagtttcatgttaa

SEQ ID NO: 122260 - DNA, 25 bp, Homo sapien
cgtcgtaaccggtgtttcatgttaa

SEQ ID NO: 122261 - DNA, 25 bp, Homo sapien
accttggtccaatggtcatgtaaat

SEQ ID NO: 122262 - DNA, 25 bp, Homo sapien
accttggtccaaaggtcatgtaaat

SEQ ID NO: 122263 - DNA, 25 bp, Homo sapien
gagtgtgtcgacgatgtaccagaag

SEQ ID NO: 122264 - DNA, 25 bp, Homo sapien
gagtgtgtcgaccatgtaccagaag

SEQ ID NO: 122265 - DNA, 25 bp, Homo sapien
ctaaggtcaccatggtcgtagtgta

SEQ ID NO: 122266 - DNA, 25 bp, Homo sapien
ctaaggtcaccaaggtcgtagtgta

SEQ ID NO: 122267 - DNA, 25 bp, Homo sapien
ggtagactcactccagggcgaagta

SEQ ID NO: 122268 - DNA, 25 bp, Homo sapien
ggtagactcactgcagggcgaagta

SEQ ID NO: 122269 - DNA, 25 bp, Homo sapien
gggtagactcccttaggagaccttc

SEQ ID NO: 122270 - DNA, 25 bp, Homo sapien
gggtagactcccataggagaccttc

SEQ ID NO: 122271 - DNA, 25 bp, Homo sapien
gacgtccctctaccagagaggttac

SEQ ID NO: 122272 - DNA, 25 bp, Homo sapien
gacgtccctctagcagagaggttac

SEQ ID NO: 122273 - DNA, 25 bp, Homo sapien
cagtaccctcagtgcgagagtacga

SEQ ID NO: 122274 - DNA, 25 bp, Homo sapien
cagtaccctcagagcgagagtacga

SEQ ID NO: 122275 - DNA, 25 bp, Homo sapien
gtatatgtataatccaaagtacgac

SEQ ID NO: 122276 - DNA, 25 bp, Homo sapien
gtatatgtataaaccaaagtacgac

SEQ ID NO: 122277 - DNA, 25 bp, Homo sapien
tcctcccgtgagaaaccaactgtaa

SEQ ID NO: 122278 - DNA, 25 bp, Homo sapien
tcctcccgtgagtaaccaactgtaa

SEQ ID NO: 122279 - DNA, 25 bp, Homo sapien
acgaacctgtgtttccgacgtggaa

SEQ ID NO: 122280 - DNA, 25 bp, Homo sapien
acgaacctgtgtatccgacgtggaa

SEQ ID NO: 122281 - DNA, 25 bp, Homo sapien
ccggacccgtgactcaggggtgact

SEQ ID NO: 122282 - DNA, 25 bp, Homo sapien
ccggacccgtgagtcaggggtgact

SEQ ID NO: 122283 - DNA, 25 bp, Homo sapien
cgggtattgtctttcatggtcttct

SEQ ID NO: 122284 - DNA, 25 bp, Homo sapien
cgggtattgtctatcatggtcttct

SEQ ID NO: 122285 - DNA, 25 bp, Homo sapien
aagtcgtaagttttagatcttcttc

SEQ ID NO: 122286 - DNA, 25 bp, Homo sapien
aagtcgtaagttatagatcttcttc

SEQ ID NO: 122287 - DNA, 25 bp, Homo sapien
tcagcgaagtctgaagaactatttc

SEQ ID NO: 122288 - DNA, 25 bp, Homo sapien
tcagcgaagtctcaagaactatttc

SEQ ID NO: 122289 - DNA, 25 bp, Homo sapien
ctgaaccgactgtcgtcactctttc

SEQ ID NO: 122290 - DNA, 25 bp, Homo sapien
ctgaaccgactgacgtcactctttc

SEQ ID NO: 122291 - DNA, 25 bp, Homo sapien
gtcgaaactacaagtctttgtagtt

SEQ ID NO: 122292 - DNA, 25 bp, Homo sapien
gtcgaaactacatgtctttgtagtt

SEQ ID NO: 122293 - DNA, 25 bp, Homo sapien
tgggtcttaacagtttctatgtcta

SEQ ID NO: 122294 - DNA, 25 bp, Homo sapien
tgggtcttaacactttctatgtcta

SEQ ID NO: 122295 - DNA, 25 bp, Homo sapien
ggtctggtcatttattcgttctcga

SEQ ID NO: 122296 - DNA, 25 bp, Homo sapien
ggtctggtcattaattcgttctcga

SEQ ID NO: 122297 - DNA, 25 bp, Homo sapien
aagtatatgttttcgactgtctcgt

SEQ ID NO: 122298 - DNA, 25 bp, Homo sapien
aagtatatgtttacgactgtctcgt

SEQ ID NO: 122299 - DNA, 25 bp, Homo sapien
cgttaagacatacattgacgttatt

SEQ ID NO: 122300 - DNA, 25 bp, Homo sapien
cgttaagacatagattgacgttatt

SEQ ID NO: 122301 - DNA, 25 bp, Homo sapien
ttgtttatgtacttcgactagatac

SEQ ID NO: 122302 - DNA, 25 bp, Homo sapien
ttgtttatgtacatcgactagatac

SEQ ID NO: 122303 - DNA, 25 bp, Homo sapien
tcgtcgttgtctgacccactgtctc

SEQ ID NO: 122304 - DNA, 25 bp, Homo sapien
tcgtcgttgtctcacccactgtctc

SEQ ID NO: 122305 - DNA, 25 bp, Homo sapien
ggtcggtgcagagacgtaccgtcac

SEQ ID NO: 122306 - DNA, 25 bp, Homo sapien
ggtcggtgcagacacgtaccgtcac

SEQ ID NO: 122307 - DNA, 25 bp, Homo sapien
aataatcggttacgtgacatctcaa

SEQ ID NO: 122308 - DNA, 25 bp, Homo sapien
aataatcggttaggtgacatctcaa

SEQ ID NO: 122309 - DNA, 25 bp, Homo sapien
gagtctataggtagggaatcctcag

SEQ ID NO: 122310 - DNA, 25 bp, Homo sapien
gagtctataggttgggaatcctcag

SEQ ID NO: 122311 - DNA, 25 bp, Homo sapien
ggacctgaggacctggaagccacag

SEQ ID NO: 122312 - DNA, 25 bp, Homo sapien
ggacctgaggacgtggaagccacag

SEQ ID NO: 122313 - DNA, 25 bp, Homo sapien
gaacgtcgaaacagggtatgcccat

SEQ ID NO: 122314 - DNA, 25 bp, Homo sapien
gaacgtcgaaactgggtatgcccat

SEQ ID NO: 122315 - DNA, 25 bp, Homo sapien
gtcatcgtatgaaccgggacccaaa

SEQ ID NO: 122316 - DNA, 25 bp, Homo sapien
gtcatcgtatgatccgggacccaaa

SEQ ID NO: 122317 - DNA, 25 bp, Homo sapien
tcttacggtgtgtcgtcaccaaacg

SEQ ID NO: 122318 - DNA, 25 bp, Homo sapien
tcttacggtgtgacgtcaccaaacg

SEQ ID NO: 122319 - DNA, 25 bp, Homo sapien
tatggttgaatgtgtccactatgtc

SEQ ID NO: 122320 - DNA, 25 bp, Homo sapien
tatggttgaatgagtccactatgtc

SEQ ID NO: 122321 - DNA, 25 bp, Homo sapien
gtctagaatatacaatccctaggtc

SEQ ID NO: 122322 - DNA, 25 bp, Homo sapien
gtctagaatatagaatccctaggtc

SEQ ID NO: 122323 - DNA, 25 bp, Homo sapien
gtcaaatatatggagttctatcttc

SEQ ID NO: 122324 - DNA, 25 bp, Homo sapien
gtcaaatatatgcagttctatcttc

SEQ ID NO: 122325 - DNA, 25 bp, Homo sapien
ttacaagaggatgacttatcagtcc

SEQ ID NO: 122326 - DNA, 25 bp, Homo sapien
ttacaagaggatcacttatcagtcc

SEQ ID NO: 122327 - DNA, 25 bp, Homo sapien
cgtacagaagaaggagttccggtta

SEQ ID NO: 122328 - DNA, 25 bp, Homo sapien
cgtacagaagaacgagttccggtta

SEQ ID NO: 122329 - DNA, 25 bp, Homo sapien
tatgacgacatcgagaccattacta

SEQ ID NO: 122330 - DNA, 25 bp, Homo sapien
tatgacgacatccagaccattacta

SEQ ID NO: 122331 - DNA, 25 bp, Homo sapien
tctcggaattacatctattgacgta

SEQ ID NO: 122332 - DNA, 25 bp, Homo sapien
tctcggaattacttctattgacgta

SEQ ID NO: 122333 - DNA, 25 bp, Homo sapien
tcaccttcgtcgttctttagacgtc

SEQ ID NO: 122334 - DNA, 25 bp, Homo sapien
tcaccttcgtcgatctttagacgtc

SEQ ID NO: 122335 - DNA, 25 bp, Homo sapien
ggtgtcacctcaagaaacaacactc

SEQ ID NO: 122336 - DNA, 25 bp, Homo sapien
ggtgtcacctcatgaaacaacactc

SEQ ID NO: 122337 - DNA, 25 bp, Homo sapien
aaccggggaccctggtaacatagaa

SEQ ID NO: 122338 - DNA, 25 bp, Homo sapien
aaccggggacccaggtaacatagaa

SEQ ID NO: 122339 - DNA, 25 bp, Homo sapien
atggaggacccacgagagacatgta

SEQ ID NO: 122340 - DNA, 25 bp, Homo sapien
atggaggacccaggagagacatgta

SEQ ID NO: 122341 - DNA, 25 bp, Homo sapien
gtcgttatcaggaacaaataatctt

SEQ ID NO: 122342 - DNA, 25 bp, Homo sapien
gtcgttatcaggtacaaataatctt

SEQ ID NO: 122343 - DNA, 25 bp, Homo sapien
gttacgatgtgttccaaactcctct

SEQ ID NO: 122344 - DNA, 25 bp, Homo sapien
gttacgatgtgtaccaaactcctct

SEQ ID NO: 122345 - DNA, 25 bp, Homo sapien
atgagacgttactaaaactacatga

SEQ ID NO: 122346 - DNA, 25 bp, Homo sapien
atgagacgttacaaaaactacatga

SEQ ID NO: 122347 - DNA, 25 bp, Homo sapien
aggtttctctcaattatgtactgac

SEQ ID NO: 122348 - DNA, 25 bp, Homo sapien
aggtttctctcatttatgtactgac

SEQ ID NO: 122349 - DNA, 25 bp, Homo sapien
agacttccttagaacagactgttga

SEQ ID NO: 122350 - DNA, 25 bp, Homo sapien
agacttccttagtacagactgttga

SEQ ID NO: 122351 - DNA, 25 bp, Homo sapien
gcgttaggactgtcgcgacttgaag

SEQ ID NO: 122352 - DNA, 25 bp, Homo sapien
gcgttaggactgacgcgacttgaag

SEQ ID NO: 122353 - DNA, 25 bp, Homo sapien
gaactacgactatgatccaatgaag

SEQ ID NO: 122354 - DNA, 25 bp, Homo sapien
gaactacgactaagatccaatgaag

SEQ ID NO: 122355 - DNA, 25 bp, Homo sapien
gaggtcaggatgtccgtacacggaa

SEQ ID NO: 122356 - DNA, 25 bp, Homo sapien
gaggtcaggatgaccgtacacggaa

SEQ ID NO: 122357 - DNA, 25 bp, Homo sapien
cgtatggggacgacttgactcacga

SEQ ID NO: 122358 - DNA, 25 bp, Homo sapien
cgtatggggacgtcttgactcacga

SEQ ID NO: 122359 - DNA, 25 bp, Homo sapien
acttgtgggagtcattgtcaccgag

SEQ ID NO: 122360 - DNA, 25 bp, Homo sapien
acttgtgggagtgattgtcaccgag

SEQ ID NO: 122361 - DNA, 25 bp, Homo sapien
cctacttggtgcaatgtctcctaca

SEQ ID NO: 122362 - DNA, 25 bp, Homo sapien
cctacttggtgctatgtctcctaca

SEQ ID NO: 122363 - DNA, 25 bp, Homo sapien
ccttctgagccagtcggttcgtaac

SEQ ID NO: 122364 - DNA, 25 bp, Homo sapien
ccttctgagccactcggttcgtaac

SEQ ID NO: 122365 - DNA, 25 bp, Homo sapien
attgtaccatttcaaaacacgatta

SEQ ID NO: 122366 - DNA, 25 bp, Homo sapien
attgtaccatttgaaaacacgatta

SEQ ID NO: 122367 - DNA, 25 bp, Homo sapien
cctgcccttcgattcgtccgtggta

SEQ ID NO: 122368 - DNA, 25 bp, Homo sapien
cctgcccttcgaatcgtccgtggta

SEQ ID NO: 122369 - DNA, 25 bp, Homo sapien
cttctatggatgacttatcgtggta

SEQ ID NO: 122370 - DNA, 25 bp, Homo sapien
cttctatggatgtcttatcgtggta

SEQ ID NO: 122371 - DNA, 25 bp, Homo sapien
ctgtaactggtctatactttcaggg

SEQ ID NO: 122372 - DNA, 25 bp, Homo sapien
ctgtaactggtcaatactttcaggg

SEQ ID NO: 122373 - DNA, 25 bp, Homo sapien
ggtttcggactcctcttagcagtgg

SEQ ID NO: 122374 - DNA, 25 bp, Homo sapien
ggtttcggactcgtcttagcagtgg

SEQ ID NO: 122375 - DNA, 25 bp, Homo sapien
ctgggtttgggacctcccagtgtag

SEQ ID NO: 122376 - DNA, 25 bp, Homo sapien
ctgggtttgggagctcccagtgtag

SEQ ID NO: 122377 - DNA, 25 bp, Homo sapien
gcgttatagtcgagcccaaaggacg

SEQ ID NO: 122378 - DNA, 25 bp, Homo sapien
gcgttatagtcgtgcccaaaggacg

SEQ ID NO: 122379 - DNA, 25 bp, Homo sapien
ggtatgtctgattccccggaggtct

SEQ ID NO: 122380 - DNA, 25 bp, Homo sapien
ggtatgtctgataccccggaggtct

SEQ ID NO: 122381 - DNA, 25 bp, Homo sapien
gtaggtcttaagtgggtttcggacc

SEQ ID NO: 122382 - DNA, 25 bp, Homo sapien
gtaggtcttaagagggtttcggacc

SEQ ID NO: 122383 - DNA, 25 bp, Homo sapien
gcctctccgccaggtgccaagaggt

SEQ ID NO: 122384 - DNA, 25 bp, Homo sapien
gcctctccgccacgtgccaagaggt

SEQ ID NO: 122385 - DNA, 25 bp, Homo sapien
gacactccgtcctcgctcgatttgg

SEQ ID NO: 122386 - DNA, 25 bp, Homo sapien
gacactccgtccacgctcgatttgg

SEQ ID NO: 122387 - DNA, 25 bp, Homo sapien
ctctactccttcactcagagtttgg

SEQ ID NO: 122388 - DNA, 25 bp, Homo sapien
ctctactccttctctcagagtttgg

SEQ ID NO: 122389 - DNA, 25 bp, Homo sapien
cctccgcggacagcaacgcttacga

SEQ ID NO: 122390 - DNA, 25 bp, Homo sapien
cctccgcggacaccaacgcttacga

SEQ ID NO: 122391 - DNA, 25 bp, Homo sapien
ccggtaccgtcgaaagtaccgcaga

SEQ ID NO: 122392 - DNA, 25 bp, Homo sapien
ccggtaccgtcgtaagtaccgcaga

SEQ ID NO: 122393 - DNA, 25 bp, Homo sapien
ctctgtcgaccgtaaacttcgagat

SEQ ID NO: 122394 - DNA, 25 bp, Homo sapien
ctctgtcgaccgaaaacttcgagat

SEQ ID NO: 122395 - DNA, 25 bp, Homo sapien
ccttctggaatagtagctacacaga

SEQ ID NO: 122396 - DNA, 25 bp, Homo sapien
ccttctggaatactagctacacaga

SEQ ID NO: 122397 - DNA, 25 bp, Homo sapien
ttattaaactttcatacgacgaagg

SEQ ID NO: 122398 - DNA, 25 bp, Homo sapien
ttattaaactttgatacgacgaagg

SEQ ID NO: 122399 - DNA, 25 bp, Homo sapien
acaaacgatctggaccgtaaacgag

SEQ ID NO: 122400 - DNA, 25 bp, Homo sapien
acaaacgatctgcaccgtaaacgag

SEQ ID NO: 122401 - DNA, 25 bp, Homo sapien
gaccgatcctggttccgttgacagt

SEQ ID NO: 122402 - DNA, 25 bp, Homo sapien
gaccgatcctggatccgttgacagt

SEQ ID NO: 122403 - DNA, 25 bp, Homo sapien
tcagcggcgctctacgtcggaggcc

SEQ ID NO: 122404 - DNA, 25 bp, Homo sapien
tcagcggcgctcaacgtcggaggcc

SEQ ID NO: 122405 - DNA, 25 bp, Homo sapien
ccggagtcgccctgtagtaggcctg

SEQ ID NO: 122406 - DNA, 25 bp, Homo sapien
ccggagtcgcccagtagtaggcctg

SEQ ID NO: 122407 - DNA, 25 bp, Homo sapien
ctcgagttcgacacttaggatagtg

SEQ ID NO: 122408 - DNA, 25 bp, Homo sapien
ctcgagttcgactcttaggatagtg

SEQ ID NO: 122409 - DNA, 25 bp, Homo sapien
tacccggtccgagtcagggtatagt

SEQ ID NO: 122410 - DNA, 25 bp, Homo sapien
tacccggtccgactcagggtatagt

SEQ ID NO: 122411 - DNA, 25 bp, Homo sapien
tgttagcatgcctcttcggtgaagt

SEQ ID NO: 122412 - DNA, 25 bp, Homo sapien
tgttagcatgccacttcggtgaagt

SEQ ID NO: 122413 - DNA, 25 bp, Homo sapien
gcagagacactaacttcgtctgaag

SEQ ID NO: 122414 - DNA, 25 bp, Homo sapien
gcagagacactatcttcgtctgaag

SEQ ID NO: 122415 - DNA, 25 bp, Homo sapien
agtttacgacacatcgtattcttgg

SEQ ID NO: 122416 - DNA, 25 bp, Homo sapien
agtttacgacacttcgtattcttgg

SEQ ID NO: 122417 - DNA, 25 bp, Homo sapien
ggcagagtacttgacttcggtagag

SEQ ID NO: 122418 - DNA, 25 bp, Homo sapien
ggcagagtacttcacttcggtagag

SEQ ID NO: 122419 - DNA, 25 bp, Homo sapien
ctgataggtacgtccctccggacgt

SEQ ID NO: 122420 - DNA, 25 bp, Homo sapien
ctgataggtacgaccctccggacgt

SEQ ID NO: 122421 - DNA, 25 bp, Homo sapien
cccttgtaggtgagcacccgagact

SEQ ID NO: 122422 - DNA, 25 bp, Homo sapien
cccttgtaggtgtgcacccgagact

SEQ ID NO: 122423 - DNA, 25 bp, Homo sapien
tctagtttgagggtcccgcgtcccc

SEQ ID NO: 122424 - DNA, 25 bp, Homo sapien
tctagtttgaggctcccgcgtcccc

SEQ ID NO: 122425 - DNA, 25 bp, Homo sapien
tcgtttcatgtttctccgtcccgtc

SEQ ID NO: 122426 - DNA, 25 bp, Homo sapien
tcgtttcatgttactccgtcccgtc

SEQ ID NO: 122427 - DNA, 25 bp, Homo sapien
gttcttctccggtgctcctttcgtc

SEQ ID NO: 122428 - DNA, 25 bp, Homo sapien
gttcttctccggagctcctttcgtc

SEQ ID NO: 122429 - DNA, 25 bp, Homo sapien
ttttctctgaagctctgttctactg

SEQ ID NO: 122430 - DNA, 25 bp, Homo sapien
ttttctctgaaggtctgttctactg

SEQ ID NO: 122431 - DNA, 25 bp, Homo sapien
gttcttttgttgtcactgtcgactg

SEQ ID NO: 122432 - DNA, 25 bp, Homo sapien
gttcttttgttgacactgtcgactg

SEQ ID NO: 122433 - DNA, 25 bp, Homo sapien
gtccggttcttgtcctcgattcctt

SEQ ID NO: 122434 - DNA, 25 bp, Homo sapien
gtccggttcttgacctcgattcctt

SEQ ID NO: 122435 - DNA, 25 bp, Homo sapien
ctatgtttttgagtaccgaattcag

SEQ ID NO: 122436 - DNA, 25 bp, Homo sapien
ctatgtttttgactaccgaattcag

SEQ ID NO: 122437 - DNA, 25 bp, Homo sapien
tcaatctttggcttcgacagagttc

SEQ ID NO: 122438 - DNA, 25 bp, Homo sapien
tcaatctttggcatcgacagagttc

SEQ ID NO: 122439 - DNA, 25 bp, Homo sapien
aggtacacttctgtagtgggtttac

SEQ ID NO: 122440 - DNA, 25 bp, Homo sapien
aggtacacttctctagtgggtttac

SEQ ID NO: 122441 - DNA, 25 bp, Homo sapien
agtagaccgttctgccatggtcgaa

SEQ ID NO: 122442 - DNA, 25 bp, Homo sapien
agtagaccgttcagccatggtcgaa

SEQ ID NO: 122443 - DNA, 25 bp, Homo sapien
aacctctacccgtcggagtgacgac

SEQ ID NO: 122444 - DNA, 25 bp, Homo sapien
aacctctacccgacggagtgacgac

SEQ ID NO: 122445 - DNA, 25 bp, Homo sapien
gaagtccccgaggtctactccgact

SEQ ID NO: 122446 - DNA, 25 bp, Homo sapien
gaagtccccgagctctactccgact

SEQ ID NO: 122447 - DNA, 25 bp, Homo sapien
ggtgagactccgacgtgggttcctc

SEQ ID NO: 122448 - DNA, 25 bp, Homo sapien
ggtgagactccgtcgtgggttcctc

SEQ ID NO: 122449 - DNA, 25 bp, Homo sapien
gtagatcccgacttcttgatccgtc

SEQ ID NO: 122450 - DNA, 25 bp, Homo sapien
gtagatcccgacatcttgatccgtc

SEQ ID NO: 122451 - DNA, 25 bp, Homo sapien
gaaatgagtccactctagatacatc

SEQ ID NO: 122452 - DNA, 25 bp, Homo sapien
gaaatgagtccagtctagatacatc

SEQ ID NO: 122453 - DNA, 25 bp, Homo sapien
ccgggattttattcgcacgcggtat

SEQ ID NO: 122454 - DNA, 25 bp, Homo sapien
ccgggattttatacgcacgcggtat

SEQ ID NO: 122455 - DNA, 25 bp, Homo sapien
aaagaggtaacgtttatccccattt

SEQ ID NO: 122456 - DNA, 25 bp, Homo sapien
aaagaggtaacgattatccccattt

SEQ ID NO: 122457 - DNA, 25 bp, Homo sapien
gtaggagtcaactcggaccccactt

SEQ ID NO: 122458 - DNA, 25 bp, Homo sapien
gtaggagtcaacacggaccccactt

SEQ ID NO: 122459 - DNA, 25 bp, Homo sapien
ggtcgttcgagaggtactcaaccta

SEQ ID NO: 122460 - DNA, 25 bp, Homo sapien
ggtcgttcgagacgtactcaaccta

SEQ ID NO: 122461 - DNA, 25 bp, Homo sapien
cttgaggtctcaaactagcatccac

SEQ ID NO: 122462 - DNA, 25 bp, Homo sapien
cttgaggtctcatactagcatccac

SEQ ID NO: 122463 - DNA, 25 bp, Homo sapien
tcaactgcccattctgaagtcacga

SEQ ID NO: 122464 - DNA, 25 bp, Homo sapien
tcaactgcccatactgaagtcacga

SEQ ID NO: 122465 - DNA, 25 bp, Homo sapien
tgactgtacccgtccaagctccgtg

SEQ ID NO: 122466 - DNA, 25 bp, Homo sapien
tgactgtacccgaccaagctccgtg

SEQ ID NO: 122467 - DNA, 25 bp, Homo sapien
tcttccaccggtgcagtgtccgctg

SEQ ID NO: 122468 - DNA, 25 bp, Homo sapien
tcttccaccggtccagtgtccgctg

SEQ ID NO: 122469 - DNA, 25 bp, Homo sapien
ctttttctggtcacacttaccgtgt

SEQ ID NO: 122470 - DNA, 25 bp, Homo sapien
ctttttctggtctcacttaccgtgt

SEQ ID NO: 122471 - DNA, 25 bp, Homo sapien
tcagttgtaggtcaacgacttattt

SEQ ID NO: 122472 - DNA, 25 bp, Homo sapien
tcagttgtaggtgaacgacttattt

SEQ ID NO: 122473 - DNA, 25 bp, Homo sapien
ccttggtcgtagagaccctcgatct

SEQ ID NO: 122474 - DNA, 25 bp, Homo sapien
ccttggtcgtagtgaccctcgatct

SEQ ID NO: 122475 - DNA, 25 bp, Homo sapien
cggttcaggtggtctcaccgacgtc

SEQ ID NO: 122476 - DNA, 25 bp, Homo sapien
cggttcaggtggactcaccgacgtc

SEQ ID NO: 122477 - DNA, 25 bp, Homo sapien
ttccagtatcgtcgagtccgtgtcg

SEQ ID NO: 122478 - DNA, 25 bp, Homo sapien
ttccagtatcgtggagtccgtgtcg

SEQ ID NO: 122479 - DNA, 25 bp, Homo sapien
atttggagtatttaagtcctctcgt

SEQ ID NO: 122480 - DNA, 25 bp, Homo sapien
atttggagtattaaagtcctctcgt

SEQ ID NO: 122481 - DNA, 25 bp, Homo sapien
cctggacggagatcacacgtcgtcc

SEQ ID NO: 122482 - DNA, 25 bp, Homo sapien
cctggacggagaacacacgtcgtcc

SEQ ID NO: 122483 - DNA, 25 bp, Homo sapien
cgtccatggcgaagagtacgtcgtc

SEQ ID NO: 122484 - DNA, 25 bp, Homo sapien
cgtccatggcgatgagtacgtcgtc

SEQ ID NO: 122485 - DNA, 25 bp, Homo sapien
cgcctgtacgggtacgagtcgagtt

SEQ ID NO: 122486 - DNA, 25 bp, Homo sapien
cgcctgtacgggaacgagtcgagtt

SEQ ID NO: 122487 - DNA, 25 bp, Homo sapien
gacggtgtagtgtagttcacggtac

SEQ ID NO: 122488 - DNA, 25 bp, Homo sapien
gacggtgtagtgaagttcacggtac

SEQ ID NO: 122489 - DNA, 25 bp, Homo sapien
ttggaacttagtccaggctccgaag

SEQ ID NO: 122490 - DNA, 25 bp, Homo sapien
ttggaacttagtgcaggctccgaag

SEQ ID NO: 122491 - DNA, 25 bp, Homo sapien
cggcctgtccaggacgtctacgaag

SEQ ID NO: 122492 - DNA, 25 bp, Homo sapien
cggcctgtccagcacgtctacgaag

SEQ ID NO: 122493 - DNA, 25 bp, Homo sapien
gccgaccgcaggtaaggactcgacc

SEQ ID NO: 122494 - DNA, 25 bp, Homo sapien
gccgaccgcaggaaaggactcgacc

SEQ ID NO: 122495 - DNA, 25 bp, Homo sapien
agacgaccgaagtgaacgcaccgcc

SEQ ID NO: 122496 - DNA, 25 bp, Homo sapien
agacgaccgaagagaacgcaccgcc

SEQ ID NO: 122497 - DNA, 25 bp, Homo sapien
ggtacattgaagagagtcaaccacc

SEQ ID NO: 122498 - DNA, 25 bp, Homo sapien
ggtacattgaagtgagtcaaccacc

SEQ ID NO: 122499 - DNA, 25 bp, Homo sapien
ttgatcgaacgcactgacacacagg

SEQ ID NO: 122500 - DNA, 25 bp, Homo sapien
ttgatcgaacgctctgacacacagg

SEQ ID NO: 122501 - DNA, 25 bp, Homo sapien
tcgtaagtcttcaacatagagtagt

SEQ ID NO: 122502 - DNA, 25 bp, Homo sapien
tcgtaagtcttctacatagagtagt

SEQ ID NO: 122503 - DNA, 25 bp, Homo sapien
gtcgacccctttcaagacctcgagg

SEQ ID NO: 122504 - DNA, 25 bp, Homo sapien
gtcgacccctttgaagacctcgagg

SEQ ID NO: 122505 - DNA, 25 bp, Homo sapien
gtccccgacgactagaccaaagagg

SEQ ID NO: 122506 - DNA, 25 bp, Homo sapien
gtccccgacgacaagaccaaagagg

SEQ ID NO: 122507 - DNA, 25 bp, Homo sapien
ggaccaggtaccaagcttcaaggag

SEQ ID NO: 122508 - DNA, 25 bp, Homo sapien
ggaccaggtacctagcttcaaggag

SEQ ID NO: 122509 - DNA, 25 bp, Homo sapien
ggtggaacgttgtccttctttgtag

SEQ ID NO: 122510 - DNA, 25 bp, Homo sapien
ggtggaacgttgaccttctttgtag

SEQ ID NO: 122511 - DNA, 25 bp, Homo sapien
tggtgacagtgctcccttctttctc

SEQ ID NO: 122512 - DNA, 25 bp, Homo sapien
tggtgacagtgcacccttctttctc

SEQ ID NO: 122513 - DNA, 25 bp, Homo sapien
tcaggaagaggttatgtttcctttc

SEQ ID NO: 122514 - DNA, 25 bp, Homo sapien
tcaggaagaggtaatgtttcctttc

SEQ ID NO: 122515 - DNA, 25 bp, Homo sapien
aaatatgatatgtgtccgtcattgc

SEQ ID NO: 122516 - DNA, 25 bp, Homo sapien
aaatatgatatgagtccgtcattgc

SEQ ID NO: 122517 - DNA, 25 bp, Homo sapien
gactatgaatctggtccggaagagg

SEQ ID NO: 122518 - DNA, 25 bp, Homo sapien
gactatgaatctcgtccggaagagg

SEQ ID NO: 122519 - DNA, 25 bp, Homo sapien
catgagactttctcgggagacgtcg

SEQ ID NO: 122520 - DNA, 25 bp, Homo sapien
catgagactttcacgggagacgtcg

SEQ ID NO: 122521 - DNA, 25 bp, Homo sapien
gtcttcttacctacgttaagatacg

SEQ ID NO: 122522 - DNA, 25 bp, Homo sapien
gtcttcttaccttcgttaagatacg

SEQ ID NO: 122523 - DNA, 25 bp, Homo sapien
cttttctgccgctcctttatgtcgt

SEQ ID NO: 122524 - DNA, 25 bp, Homo sapien
cttttctgccgcacctttatgtcgt

SEQ ID NO: 122525 - DNA, 25 bp, Homo sapien
ctctttcttctccccttaggtttac

SEQ ID NO: 122526 - DNA, 25 bp, Homo sapien
ctctttcttctcgccttaggtttac

SEQ ID NO: 122527 - DNA, 25 bp, Homo sapien
tacgtcctcattcctaggtccgtgt

SEQ ID NO: 122528 - DNA, 25 bp, Homo sapien
tacgtcctcattgctaggtccgtgt

SEQ ID NO: 122529 - DNA, 25 bp, Homo sapien
ttcctcgactccttctagagtttcg

SEQ ID NO: 122530 - DNA, 25 bp, Homo sapien
ttcctcgactccatctagagtttcg

SEQ ID NO: 122531 - DNA, 25 bp, Homo sapien
ccctagtacgtactagtcaattcag

SEQ ID NO: 122532 - DNA, 25 bp, Homo sapien
ccctagtacgtagtagtcaattcag

SEQ ID NO: 122533 - DNA, 25 bp, Homo sapien
cacgactcgtcacctctttgtgttg

SEQ ID NO: 122534 - DNA, 25 bp, Homo sapien
cacgactcgtcagctctttgtgttg

SEQ ID NO: 122535 - DNA, 25 bp, Homo sapien
ctacaacctcaggtcattcgggtat

SEQ ID NO: 122536 - DNA, 25 bp, Homo sapien
ctacaacctcagctcattcgggtat

SEQ ID NO: 122537 - DNA, 25 bp, Homo sapien
taaaacagtgcccattctaggtacg

SEQ ID NO: 122538 - DNA, 25 bp, Homo sapien
taaaacagtgccgattctaggtacg

SEQ ID NO: 122539 - DNA, 25 bp, Homo sapien
aaaatagggaacaattactacggac

SEQ ID NO: 122540 - DNA, 25 bp, Homo sapien
aaaatagggaactattactacggac

SEQ ID NO: 122541 - DNA, 25 bp, Homo sapien
gtataaaagtggacccattgaccat

SEQ ID NO: 122542 - DNA, 25 bp, Homo sapien
gtataaaagtggtcccattgaccat

SEQ ID NO: 122543 - DNA, 25 bp, Homo sapien
cgtaaaaaagttctcctttgtagaa

SEQ ID NO: 122544 - DNA, 25 bp, Homo sapien
cgtaaaaaagttgtcctttgtagaa

SEQ ID NO: 122545 - DNA, 25 bp, Homo sapien
gaatactggtttaccgtcctgtaaa

SEQ ID NO: 122546 - DNA, 25 bp, Homo sapien
gaatactggttttccgtcctgtaaa

SEQ ID NO: 122547 - DNA, 25 bp, Homo sapien
acttttgactacagaccgttcgatt

SEQ ID NO: 122548 - DNA, 25 bp, Homo sapien
acttttgactactgaccgttcgatt

SEQ ID NO: 122549 - DNA, 25 bp, Homo sapien
cctgttctcctgttccgtatcgaac

SEQ ID NO: 122550 - DNA, 25 bp, Homo sapien
cctgttctcctgatccgtatcgaac

SEQ ID NO: 122551 - DNA, 25 bp, Homo sapien
cgagtttacgcctgaacctgtgtga

SEQ ID NO: 122552 - DNA, 25 bp, Homo sapien
cgagtttacgccagaacctgtgtga

SEQ ID NO: 122553 - DNA, 25 bp, Homo sapien
ttgtcaaaccacaggaaggtctcgg

SEQ ID NO: 122554 - DNA, 25 bp, Homo sapien
ttgtcaaaccactggaaggtctcgg

SEQ ID NO: 122555 - DNA, 25 bp, Homo sapien
tgacatcgaccgtttccagacccta

SEQ ID NO: 122556 - DNA, 25 bp, Homo sapien
tgacatcgaccgattccagacccta

SEQ ID NO: 122557 - DNA, 25 bp, Homo sapien
acaggtccgtttctacgaccgctac

SEQ ID NO: 122558 - DNA, 25 bp, Homo sapien
acaggtccgtttgtacgaccgctac

SEQ ID NO: 122559 - DNA, 25 bp, Homo sapien
atccgtcggttgttctatgcttact

SEQ ID NO: 122560 - DNA, 25 bp, Homo sapien
atccgtcggttgatctatgcttact

SEQ ID NO: 122561 - DNA, 25 bp, Homo sapien
tccctggtgttgtgttacgattact

SEQ ID NO: 122562 - DNA, 25 bp, Homo sapien
tccctggtgttgagttacgattact

SEQ ID NO: 122563 - DNA, 25 bp, Homo sapien
tccctcttgttacacgtccgtttcg

SEQ ID NO: 122564 - DNA, 25 bp, Homo sapien
tccctcttgttagacgtccgtttcg

SEQ ID NO: 122565 - DNA, 25 bp, Homo sapien
acgtcacagtaagatgacgtcgttc

SEQ ID NO: 122566 - DNA, 25 bp, Homo sapien
acgtcacagtaacatgacgtcgttc

SEQ ID NO: 122567 - DNA, 25 bp, Homo sapien
accgtgagttaaacttaggtacttc

SEQ ID NO: 122568 - DNA, 25 bp, Homo sapien
accgtgagttaatcttaggtacttc

SEQ ID NO: 122569 - DNA, 25 bp, Homo sapien
aaaccggctaatctaaggactagta

SEQ ID NO: 122570 - DNA, 25 bp, Homo sapien
aaaccggctaatgtaaggactagta

SEQ ID NO: 122571 - DNA, 25 bp, Homo sapien
tatttaccttacctttccggatgtg

SEQ ID NO: 122572 - DNA, 25 bp, Homo sapien
tatttaccttacgtttccggatgtg

SEQ ID NO: 122573 - DNA, 25 bp, Homo sapien
tcgttattcgagttctgttggattc

SEQ ID NO: 122574 - DNA, 25 bp, Homo sapien
tcgttattcgagatctgttggattc

SEQ ID NO: 122575 - DNA, 25 bp, Homo sapien
tgactcccgacacctctgtcatggt

SEQ ID NO: 122576 - DNA, 25 bp, Homo sapien
tgactcccgacagctctgtcatggt

SEQ ID NO: 122577 - DNA, 25 bp, Homo sapien
gacgcttacgacttcttctatgttt

SEQ ID NO: 122578 - DNA, 25 bp, Homo sapien
gacgcttacgacatcttctatgttt

SEQ ID NO: 122579 - DNA, 25 bp, Homo sapien
tccggtagtcactctagctttatta

SEQ ID NO: 122580 - DNA, 25 bp, Homo sapien
tccggtagtcacactagctttatta

SEQ ID NO: 122581 - DNA, 25 bp, Homo sapien
atcacacggggtctaaacctgggac

SEQ ID NO: 122582 - DNA, 25 bp, Homo sapien
atcacacggggtgtaaacctgggac

SEQ ID NO: 122583 - DNA, 25 bp, Homo sapien
ccccgagtgcggacaccctaggagg

SEQ ID NO: 122584 - DNA, 25 bp, Homo sapien
ccccgagtgcggtcaccctaggagg

SEQ ID NO: 122585 - DNA, 25 bp, Homo sapien
tacattccggtcaacttcgacgagg

SEQ ID NO: 122586 - DNA, 25 bp, Homo sapien
tacattccggtctacttcgacgagg

SEQ ID NO: 122587 - DNA, 25 bp, Homo sapien
agacaaactacatgacttaactgag

SEQ ID NO: 122588 - DNA, 25 bp, Homo sapien
agacaaactacaagacttaactgag

SEQ ID NO: 122589 - DNA, 25 bp, Homo sapien
aaagtattcgtcaaactaaagactt

SEQ ID NO: 122590 - DNA, 25 bp, Homo sapien
aaagtattcgtctaactaaagactt

SEQ ID NO: 122591 - DNA, 25 bp, Homo sapien
ctggtttagtcaactattaagacat

SEQ ID NO: 122592 - DNA, 25 bp, Homo sapien
ctggtttagtcatctattaagacat

SEQ ID NO: 122593 - DNA, 25 bp, Homo sapien
tgtatttctgtcttgatagactact

SEQ ID NO: 122594 - DNA, 25 bp, Homo sapien
tgtatttctgtcatgatagactact

SEQ ID NO: 122595 - DNA, 25 bp, Homo sapien
cacgattttatagtgttatcgtact

SEQ ID NO: 122596 - DNA, 25 bp, Homo sapien
cacgattttatactgttatcgtact

SEQ ID NO: 122597 - DNA, 25 bp, Homo sapien
gtcactttatacatacggacggttt

SEQ ID NO: 122598 - DNA, 25 bp, Homo sapien
gtcactttatacttacggacggttt

SEQ ID NO: 122599 - DNA, 25 bp, Homo sapien
atcatttctacgaacgaaactcagt

SEQ ID NO: 122600 - DNA, 25 bp, Homo sapien
atcatttctacgtacgaaactcagt

SEQ ID NO: 122601 - DNA, 25 bp, Homo sapien
gatctttgtcgtttactaagcctac

SEQ ID NO: 122602 - DNA, 25 bp, Homo sapien
gatctttgtcgtatactaagcctac

SEQ ID NO: 122603 - DNA, 25 bp, Homo sapien
tatggtttacggagtgtgtacgcac

SEQ ID NO: 122604 - DNA, 25 bp, Homo sapien
tatggtttacggtgtgtgtacgcac

SEQ ID NO: 122605 - DNA, 25 bp, Homo sapien
tagtagtgtccgtccggtgtccaat

SEQ ID NO: 122606 - DNA, 25 bp, Homo sapien
tagtagtgtccgaccggtgtccaat

SEQ ID NO: 122607 - DNA, 25 bp, Homo sapien
tcgagacaccataccggtttcatat

SEQ ID NO: 122608 - DNA, 25 bp, Homo sapien
tcgagacaccattccggtttcatat

SEQ ID NO: 122609 - DNA, 25 bp, Homo sapien
gtttcaaccgacttaaggaatccat

SEQ ID NO: 122610 - DNA, 25 bp, Homo sapien
gtttcaaccgacataaggaatccat

SEQ ID NO: 122611 - DNA, 25 bp, Homo sapien
ggtctcaatcacgttttacatgtta

SEQ ID NO: 122612 - DNA, 25 bp, Homo sapien
ggtctcaatcaccttttacatgtta

SEQ ID NO: 122613 - DNA, 25 bp, Homo sapien
gaagtcccaacaatttcacttagtg

SEQ ID NO: 122614 - DNA, 25 bp, Homo sapien
gaagtcccaacattttcacttagtg

SEQ ID NO: 122615 - DNA, 25 bp, Homo sapien
gggtttcatttatcttcacccagta

SEQ ID NO: 122616 - DNA, 25 bp, Homo sapien
gggtttcatttaacttcacccagta

SEQ ID NO: 122617 - DNA, 25 bp, Homo sapien
gtagggatccttttattcctctcaa

SEQ ID NO: 122618 - DNA, 25 bp, Homo sapien
gtagggatccttatattcctctcaa

SEQ ID NO: 122619 - DNA, 25 bp, Homo sapien
gttgagacccctagggtcccttcat

SEQ ID NO: 122620 - DNA, 25 bp, Homo sapien
gttgagaccccttgggtcccttcat

SEQ ID NO: 122621 - DNA, 25 bp, Homo sapien
aagaaggcgtcgtggccctcgactc

SEQ ID NO: 122622 - DNA, 25 bp, Homo sapien
aagaaggcgtcgaggccctcgactc

SEQ ID NO: 122623 - DNA, 25 bp, Homo sapien
gataagggattatggccctgagtcg

SEQ ID NO: 122624 - DNA, 25 bp, Homo sapien
gataagggattaaggccctgagtcg

SEQ ID NO: 122625 - DNA, 25 bp, Homo sapien
ccacaggaagtgccggcgcttgtgc

SEQ ID NO: 122626 - DNA, 25 bp, Homo sapien
ccacaggaagtggcggcgcttgtgc

SEQ ID NO: 122627 - DNA, 25 bp, Homo sapien
cacgtgacagcttaagggtcgtgga

SEQ ID NO: 122628 - DNA, 25 bp, Homo sapien
cacgtgacagctaaagggtcgtgga

SEQ ID NO: 122629 - DNA, 25 bp, Homo sapien
acgggttacatctcagatcactgga

SEQ ID NO: 122630 - DNA, 25 bp, Homo sapien
acgggttacatcacagatcactgga

SEQ ID NO: 122631 - DNA, 25 bp, Homo sapien
tcgtgtcgggtctgaatgaatctga

SEQ ID NO: 122632 - DNA, 25 bp, Homo sapien
tcgtgtcgggtcagaatgaatctga

SEQ ID NO: 122633 - DNA, 25 bp, Homo sapien
tacttggagtcataaacgagtttac

SEQ ID NO: 122634 - DNA, 25 bp, Homo sapien
tacttggagtcaaaaacgagtttac

SEQ ID NO: 122635 - DNA, 25 bp, Homo sapien
acggagggaaaaggtagacttcgtc

SEQ ID NO: 122636 - DNA, 25 bp, Homo sapien
acggagggaaaacgtagacttcgtc

SEQ ID NO: 122637 - DNA, 25 bp, Homo sapien
tcaagaaggaaacacttgtacacct

SEQ ID NO: 122638 - DNA, 25 bp, Homo sapien
tcaagaaggaaagacttgtacacct

SEQ ID NO: 122639 - DNA, 25 bp, Homo sapien
gtcatgaaagtatgggtgtcgactc

SEQ ID NO: 122640 - DNA, 25 bp, Homo sapien
gtcatgaaagtaagggtgtcgactc

SEQ ID NO: 122641 - DNA, 25 bp, Homo sapien
gttacttgtgaggaggtaatcctct

SEQ ID NO: 122642 - DNA, 25 bp, Homo sapien
gttacttgtgagcaggtaatcctct

SEQ ID NO: 122643 - DNA, 25 bp, Homo sapien
ggtccgtgtttacactaaactcctc

SEQ ID NO: 122644 - DNA, 25 bp, Homo sapien
ggtccgtgtttagactaaactcctc

SEQ ID NO: 122645 - DNA, 25 bp, Homo sapien
cggttcgaaacacgatgatacccta

SEQ ID NO: 122646 - DNA, 25 bp, Homo sapien
cggttcgaaacaggatgatacccta

SEQ ID NO: 122647 - DNA, 25 bp, Homo sapien
gacggtcgaagtgtgagtgcccctt

SEQ ID NO: 122648 - DNA, 25 bp, Homo sapien
gacggtcgaagtctgagtgcccctt

SEQ ID NO: 122649 - DNA, 25 bp, Homo sapien
cacaagttagacatgagaccttttt

SEQ ID NO: 122650 - DNA, 25 bp, Homo sapien
cacaagttagacttgagaccttttt

SEQ ID NO: 122651 - DNA, 25 bp, Homo sapien
tcaacattaggaggtgtaccattta

SEQ ID NO: 122652 - DNA, 25 bp, Homo sapien
tcaacattaggacgtgtaccattta

SEQ ID NO: 122653 - DNA, 25 bp, Homo sapien
tccaaaaatccgtgtgccgtattct

SEQ ID NO: 122654 - DNA, 25 bp, Homo sapien
tccaaaaatccgagtgccgtattct

SEQ ID NO: 122655 - DNA, 25 bp, Homo sapien
aaatctatgtagtttacgacgaact

SEQ ID NO: 122656 - DNA, 25 bp, Homo sapien
aaatctatgtagattacgacgaact

SEQ ID NO: 122657 - DNA, 25 bp, Homo sapien
gtacgcagtgactcaatacgaacct

SEQ ID NO: 122658 - DNA, 25 bp, Homo sapien
gtacgcagtgacacaatacgaacct

SEQ ID NO: 122659 - DNA, 25 bp, Homo sapien
ggaactgccccgacgatagacggaa

SEQ ID NO: 122660 - DNA, 25 bp, Homo sapien
ggaactgccccgtcgatagacggaa

SEQ ID NO: 122661 - DNA, 25 bp, Homo sapien
tacagtttagacacaagtatgtcta

SEQ ID NO: 122662 - DNA, 25 bp, Homo sapien
tacagtttagactcaagtatgtcta

SEQ ID NO: 122663 - DNA, 25 bp, Homo sapien
ataggctgttctctgaacgtagatc

SEQ ID NO: 122664 - DNA, 25 bp, Homo sapien
ataggctgttctgtgaacgtagatc

SEQ ID NO: 122665 - DNA, 25 bp, Homo sapien
tatgactacaaagacgacgacaaca

SEQ ID NO: 122666 - DNA, 25 bp, Homo sapien
tatgactacaaacacgacgacaaca

SEQ ID NO: 122667 - DNA, 25 bp, Homo sapien
gtgactcgtaacatcgcgcggaaga

SEQ ID NO: 122668 - DNA, 25 bp, Homo sapien
gtgactcgtaacttcgcgcggaaga

SEQ ID NO: 122669 - DNA, 25 bp, Homo sapien
cagtagtttcatcacggtgaccggc

SEQ ID NO: 122670 - DNA, 25 bp, Homo sapien
cagtagtttcatgacggtgaccggc

SEQ ID NO: 122671 - DNA, 25 bp, Homo sapien
cgtagagtttgacattcaggtgact

SEQ ID NO: 122672 - DNA, 25 bp, Homo sapien
cgtagagtttgagattcaggtgact

SEQ ID NO: 122673 - DNA, 25 bp, Homo sapien
gggaggttctcattcttgtctgggt

SEQ ID NO: 122674 - DNA, 25 bp, Homo sapien
gggaggttctcaatcttgtctgggt

SEQ ID NO: 122675 - DNA, 25 bp, Homo sapien
cagaaggactgacttttattgtcga

SEQ ID NO: 122676 - DNA, 25 bp, Homo sapien
cagaaggactgagttttattgtcga

SEQ ID NO: 122677 - DNA, 25 bp, Homo sapien
caggtcatagtcgtctcagattctg

SEQ ID NO: 122678 - DNA, 25 bp, Homo sapien
caggtcatagtcctctcagattctg

SEQ ID NO: 122679 - DNA, 25 bp, Homo sapien
tggtgggtattgatccttcttttcg

SEQ ID NO: 122680 - DNA, 25 bp, Homo sapien
tggtgggtattgttccttcttttcg

SEQ ID NO: 122681 - DNA, 25 bp, Homo sapien
tgtggtcgtttaattttcactttat

SEQ ID NO: 122682 - DNA, 25 bp, Homo sapien
tgtggtcgtttatttttcactttat

SEQ ID NO: 122683 - DNA, 25 bp, Homo sapien
ggaccgatacctttataacgtcaat

SEQ ID NO: 122684 - DNA, 25 bp, Homo sapien
ggaccgatacctatataacgtcaat

SEQ ID NO: 122685 - DNA, 25 bp, Homo sapien
aggggcgatcctctagaacgtcaat

SEQ ID NO: 122686 - DNA, 25 bp, Homo sapien
aggggcgatcctgtagaacgtcaat

SEQ ID NO: 122687 - DNA, 25 bp, Homo sapien
gagtggaggtgacgacgactcttaa

SEQ ID NO: 122688 - DNA, 25 bp, Homo sapien
gagtggaggtgaggacgactcttaa

SEQ ID NO: 122689 - DNA, 25 bp, Homo sapien
cgatgtaccgggtttcgatatgata

SEQ ID NO: 122690 - DNA, 25 bp, Homo sapien
cgatgtaccgggattcgatatgata

SEQ ID NO: 122691 - DNA, 25 bp, Homo sapien
aggaccgatcgagtcgtggtacaat

SEQ ID NO: 122692 - DNA, 25 bp, Homo sapien
aggaccgatcgactcgtggtacaat

SEQ ID NO: 122693 - DNA, 25 bp, Homo sapien
actttaccacaacattgtcagttaa

SEQ ID NO: 122694 - DNA, 25 bp, Homo sapien
actttaccacaagattgtcagttaa

SEQ ID NO: 122695 - DNA, 25 bp, Homo sapien
actggtaataaagatttctcacttt

SEQ ID NO: 122696 - DNA, 25 bp, Homo sapien
actggtaataaacatttctcacttt

SEQ ID NO: 122697 - DNA, 25 bp, Homo sapien
tttaaacaatcttatgtcgtcaagg

SEQ ID NO: 122698 - DNA, 25 bp, Homo sapien
tttaaacaatctaatgtcgtcaagg

SEQ ID NO: 122699 - DNA, 25 bp, Homo sapien
gtcccaaataccagtcgagtcaatc

SEQ ID NO: 122700 - DNA, 25 bp, Homo sapien
gtcccaaatacctgtcgagtcaatc

SEQ ID NO: 122701 - DNA, 25 bp, Homo sapien
ctccataaaagaggtggtcttcgac

SEQ ID NO: 122702 - DNA, 25 bp, Homo sapien
ctccataaaagacgtggtcttcgac

SEQ ID NO: 122703 - DNA, 25 bp, Homo sapien
actggtaaccggaagctaaatgtcc

SEQ ID NO: 122704 - DNA, 25 bp, Homo sapien
actggtaaccggtagctaaatgtcc

SEQ ID NO: 122705 - DNA, 25 bp, Homo sapien
aaaataatcgggttcttcacttctg

SEQ ID NO: 122706 - DNA, 25 bp, Homo sapien
aaaataatcgggatcttcacttctg

SEQ ID NO: 122707 - DNA, 25 bp, Homo sapien
gtaaactctagaaggaccaagaccg

SEQ ID NO: 122708 - DNA, 25 bp, Homo sapien
gtaaactctagatggaccaagaccg

SEQ ID NO: 122709 - DNA, 25 bp, Homo sapien
tatgaaacttgttttccacgttcag

SEQ ID NO: 122710 - DNA, 25 bp, Homo sapien
tatgaaacttgtattccacgttcag

SEQ ID NO: 122711 - DNA, 25 bp, Homo sapien
ctttcactttccaagtcccgatcgg

SEQ ID NO: 122712 - DNA, 25 bp, Homo sapien
ctttcactttcctagtcccgatcgg

SEQ ID NO: 122713 - DNA, 25 bp, Homo sapien
attatctccgtcacggcgccttagg

SEQ ID NO: 122714 - DNA, 25 bp, Homo sapien
attatctccgtctcggcgccttagg

SEQ ID NO: 122715 - DNA, 25 bp, Homo sapien
tatatgttcttctacgaaaaaggac

SEQ ID NO: 122716 - DNA, 25 bp, Homo sapien
tatatgttcttcaacgaaaaaggac

SEQ ID NO: 122717 - DNA, 25 bp, Homo sapien
ttcttgttgtcagtattacctaaat

SEQ ID NO: 122718 - DNA, 25 bp, Homo sapien
ttcttgttgtcactattacctaaat

SEQ ID NO: 122719 - DNA, 25 bp, Homo sapien
ttgacgttgtcgaaccactcctcca

SEQ ID NO: 122720 - DNA, 25 bp, Homo sapien
ttgacgttgtcgtaccactcctcca

SEQ ID NO: 122721 - DNA, 25 bp, Homo sapien
ggctgcctagtcagaaacccaggtg

SEQ ID NO: 122722 - DNA, 25 bp, Homo sapien
ggctgcctagtctgaaacccaggtg

SEQ ID NO: 122723 - DNA, 25 bp, Homo sapien
atgttgtattgattgaactcctttc

SEQ ID NO: 122724 - DNA, 25 bp, Homo sapien
atgttgtattgaatgaactcctttc

SEQ ID NO: 122725 - DNA, 25 bp, Homo sapien
ttagggacacgtacactcccgtctt

SEQ ID NO: 122726 - DNA, 25 bp, Homo sapien
ttagggacacgttcactcccgtctt

SEQ ID NO: 122727 - DNA, 25 bp, Homo sapien
tgaggtcacgtcttaccaaccttat

SEQ ID NO: 122728 - DNA, 25 bp, Homo sapien
tgaggtcacgtcataccaaccttat

SEQ ID NO: 122729 - DNA, 25 bp, Homo sapien
ctgagaggtcatcaacagaatccta

SEQ ID NO: 122730 - DNA, 25 bp, Homo sapien
ctgagaggtcatgaacagaatccta

SEQ ID NO: 122731 - DNA, 25 bp, Homo sapien
tctagaacccatacccgagaacagg

SEQ ID NO: 122732 - DNA, 25 bp, Homo sapien
tctagaacccattcccgagaacagg

SEQ ID NO: 122733 - DNA, 25 bp, Homo sapien
gctaagtctccattgggattgatag

SEQ ID NO: 122734 - DNA, 25 bp, Homo sapien
gctaagtctccaatgggattgatag

SEQ ID NO: 122735 - DNA, 25 bp, Homo sapien
tgtcgagttcatgtggacccgtggt

SEQ ID NO: 122736 - DNA, 25 bp, Homo sapien
tgtcgagttcatctggacccgtggt

SEQ ID NO: 122737 - DNA, 25 bp, Homo sapien
ctcgttagtatattggaggaccccc

SEQ ID NO: 122738 - DNA, 25 bp, Homo sapien
ctcgttagtataatggaggaccccc

SEQ ID NO: 122739 - DNA, 25 bp, Homo sapien
ggacctgttttctgaagacggcccc

SEQ ID NO: 122740 - DNA, 25 bp, Homo sapien
ggacctgttttcagaagacggcccc

SEQ ID NO: 122741 - DNA, 25 bp, Homo sapien
agccttctgctcgagaggaggtcca

SEQ ID NO: 122742 - DNA, 25 bp, Homo sapien
agccttctgctccagaggaggtcca

SEQ ID NO: 122743 - DNA, 25 bp, Homo sapien
gaatcgtttcagctattcagatgga

SEQ ID NO: 122744 - DNA, 25 bp, Homo sapien
gaatcgtttcaggtattcagatgga

SEQ ID NO: 122745 - DNA, 25 bp, Homo sapien
tgccgcaagtcgttcactcggtcga

SEQ ID NO: 122746 - DNA, 25 bp, Homo sapien
tgccgcaagtcgatcactcggtcga

SEQ ID NO: 122747 - DNA, 25 bp, Homo sapien
ctagcttcttcacttcgaccctcat

SEQ ID NO: 122748 - DNA, 25 bp, Homo sapien
ctagcttcttcagttcgaccctcat

SEQ ID NO: 122749 - DNA, 25 bp, Homo sapien
aacactaccttcacttcccgggagt

SEQ ID NO: 122750 - DNA, 25 bp, Homo sapien
aacactaccttctcttcccgggagt

SEQ ID NO: 122751 - DNA, 25 bp, Homo sapien
aaactaattcgacattacttaggta

SEQ ID NO: 122752 - DNA, 25 bp, Homo sapien
aaactaattcgagattacttaggta

SEQ ID NO: 122753 - DNA, 25 bp, Homo sapien
caagtaggtcgaggaccctgagatc

SEQ ID NO: 122754 - DNA, 25 bp, Homo sapien
caagtaggtcgacgaccctgagatc

SEQ ID NO: 122755 - DNA, 25 bp, Homo sapien
aggacgaagggactagacttggttc

SEQ ID NO: 122756 - DNA, 25 bp, Homo sapien
aggacgaagggagtagacttggttc

SEQ ID NO: 122757 - DNA, 25 bp, Homo sapien
ggaacgaaggttcttcgtgtcgtag

SEQ ID NO: 122758 - DNA, 25 bp, Homo sapien
ggaacgaaggttgttcgtgtcgtag

SEQ ID NO: 122759 - DNA, 25 bp, Homo sapien
aacgaacgtcgagtatggtttgtca

SEQ ID NO: 122760 - DNA, 25 bp, Homo sapien
aacgaacgtcgactatggtttgtca

SEQ ID NO: 122761 - DNA, 25 bp, Homo sapien
cggatcggatcgaaacgcatctcga

SEQ ID NO: 122762 - DNA, 25 bp, Homo sapien
cggatcggatcgtaacgcatctcga

SEQ ID NO: 122763 - DNA, 25 bp, Homo sapien
cggccagagtcgacagcccgtgagt

SEQ ID NO: 122764 - DNA, 25 bp, Homo sapien
cggccagagtcgtcagcccgtgagt

SEQ ID NO: 122765 - DNA, 25 bp, Homo sapien
tttggtcaccgatttcatccttgat

SEQ ID NO: 122766 - DNA, 25 bp, Homo sapien
tttggtcaccgaattcatccttgat

SEQ ID NO: 122767 - DNA, 25 bp, Homo sapien
tcggtacacaaaatgtatccttatg

SEQ ID NO: 122768 - DNA, 25 bp, Homo sapien
tcggtacacaaattgtatccttatg

SEQ ID NO: 122769 - DNA, 25 bp, Homo sapien
aaagtatatcagattttcgatcttc

SEQ ID NO: 122770 - DNA, 25 bp, Homo sapien
aaagtatatcagtttttcgatcttc

SEQ ID NO: 122771 - DNA, 25 bp, Homo sapien
ctaagacggaagtgttaatctcaaa

SEQ ID NO: 122772 - DNA, 25 bp, Homo sapien
ctaagacggaagagttaatctcaaa

SEQ ID NO: 122773 - DNA, 25 bp, Homo sapien
ggatcagatggtggtcgtatccaaa

SEQ ID NO: 122774 - DNA, 25 bp, Homo sapien
ggatcagatggtcgtcgtatccaaa

SEQ ID NO: 122775 - DNA, 25 bp, Homo sapien
taaagtcggttctgaccgtatataa

SEQ ID NO: 122776 - DNA, 25 bp, Homo sapien
taaagtcggttcagaccgtatataa

SEQ ID NO: 122777 - DNA, 25 bp, Homo sapien
tcgacatcgcgttagacccgtttcc

SEQ ID NO: 122778 - DNA, 25 bp, Homo sapien
tcgacatcgcgtaagacccgtttcc

SEQ ID NO: 122779 - DNA, 25 bp, Homo sapien
agtcgataaacgaaccctttcggac

SEQ ID NO: 122780 - DNA, 25 bp, Homo sapien
agtcgataaacgtaccctttcggac

SEQ ID NO: 122781 - DNA, 25 bp, Homo sapien
aagaacgcccggaacctttgtaact

SEQ ID NO: 122782 - DNA, 25 bp, Homo sapien
aagaacgcccggtacctttgtaact

SEQ ID NO: 122783 - DNA, 25 bp, Homo sapien
ttaagttggtcctttcgtcctttaa

SEQ ID NO: 122784 - DNA, 25 bp, Homo sapien
ttaagttggtccattcgtcctttaa

SEQ ID NO: 122785 - DNA, 25 bp, Homo sapien
aaggtgtagttctctttcccctggt

SEQ ID NO: 122786 - DNA, 25 bp, Homo sapien
aaggtgtagttcactttcccctggt

SEQ ID NO: 122787 - DNA, 25 bp, Homo sapien
ggtcagtaataattccgcgtctaat

SEQ ID NO: 122788 - DNA, 25 bp, Homo sapien
ggtcagtaataaatccgcgtctaat

SEQ ID NO: 122789 - DNA, 25 bp, Homo sapien
gtcggagtcgtcgtccagtcctaca

SEQ ID NO: 122790 - DNA, 25 bp, Homo sapien
gtcggagtcgtcctccagtcctaca

SEQ ID NO: 122791 - DNA, 25 bp, Homo sapien
gatgaaattccgaccgacgacgaag

SEQ ID NO: 122792 - DNA, 25 bp, Homo sapien
gatgaaattccgtccgacgacgaag

SEQ ID NO: 122793 - DNA, 25 bp, Homo sapien
ttattagaaattacttgcaccgaga

SEQ ID NO: 122794 - DNA, 25 bp, Homo sapien
ttattagaaatttcttgcaccgaga

SEQ ID NO: 122795 - DNA, 25 bp, Homo sapien
cttgaaacgttgactatacaagata

SEQ ID NO: 122796 - DNA, 25 bp, Homo sapien
cttgaaacgttgtctatacaagata

SEQ ID NO: 122797 - DNA, 25 bp, Homo sapien
ctttggagacttctgtgattcggag

SEQ ID NO: 122798 - DNA, 25 bp, Homo sapien
ctttggagacttgtgtgattcggag

SEQ ID NO: 122799 - DNA, 25 bp, Homo sapien
ggattggactttagggtaagtccga

SEQ ID NO: 122800 - DNA, 25 bp, Homo sapien
ggattggacttttgggtaagtccga

SEQ ID NO: 122801 - DNA, 25 bp, Homo sapien
agtcaacctgtttcaaaagtcaacg

SEQ ID NO: 122802 - DNA, 25 bp, Homo sapien
agtcaacctgttacaaaagtcaacg

SEQ ID NO: 122803 - DNA, 25 bp, Homo sapien
aaggatcaagttactcaaaccccgt

SEQ ID NO: 122804 - DNA, 25 bp, Homo sapien
aaggatcaagtttctcaaaccccgt

SEQ ID NO: 122805 - DNA, 25 bp, Homo sapien
gaaaaagtacctggtggtcacacgc

SEQ ID NO: 122806 - DNA, 25 bp, Homo sapien
gaaaaagtacctcgtggtcacacgc

SEQ ID NO: 122807 - DNA, 25 bp, Homo sapien
aacggtagaacatcattgtgctccc

SEQ ID NO: 122808 - DNA, 25 bp, Homo sapien
aacggtagaacaacattgtgctccc

SEQ ID NO: 122809 - DNA, 25 bp, Homo sapien
acaggtcgaggacgtccatggcccg

SEQ ID NO: 122810 - DNA, 25 bp, Homo sapien
acaggtcgaggaggtccatggcccg

SEQ ID NO: 122811 - DNA, 25 bp, Homo sapien
cccgggtgagtcgtccccggacatg

SEQ ID NO: 122812 - DNA, 25 bp, Homo sapien
cccgggtgagtcctccccggacatg

SEQ ID NO: 122813 - DNA, 25 bp, Homo sapien
gcgccggcggtggctcggccccatc

SEQ ID NO: 122814 - DNA, 25 bp, Homo sapien
gcgccggcggtgcctcggccccatc

SEQ ID NO: 122815 - DNA, 25 bp, Homo sapien
gtaggaggcctcgagcgccggtatc

SEQ ID NO: 122816 - DNA, 25 bp, Homo sapien
gtaggaggcctccagcgccggtatc

SEQ ID NO: 122817 - DNA, 25 bp, Homo sapien
ggaggagaggtcatcccagttgata

SEQ ID NO: 122818 - DNA, 25 bp, Homo sapien
ggaggagaggtcttcccagttgata

SEQ ID NO: 122819 - DNA, 25 bp, Homo sapien
acggactgagaaacccactgaaatg

SEQ ID NO: 122820 - DNA, 25 bp, Homo sapien
acggactgagaatcccactgaaatg

SEQ ID NO: 122821 - DNA, 25 bp, Homo sapien
aaactaagttgtcggatctttgtct

SEQ ID NO: 122822 - DNA, 25 bp, Homo sapien
aaactaagttgtgggatctttgtct

SEQ ID NO: 122823 - DNA, 25 bp, Homo sapien
cgaagactatgtctttttccttgat

SEQ ID NO: 122824 - DNA, 25 bp, Homo sapien
cgaagactatgtgtttttccttgat

SEQ ID NO: 122825 - DNA, 25 bp, Homo sapien
cgatacactatgtttcgttcatttg

SEQ ID NO: 122826 - DNA, 25 bp, Homo sapien
cgatacactatgattcgttcatttg

SEQ ID NO: 122827 - DNA, 25 bp, Homo sapien
gtacgtgcatgaacatcgacatttg

SEQ ID NO: 122828 - DNA, 25 bp, Homo sapien
gtacgtgcatgatcatcgacatttg

SEQ ID NO: 122829 - DNA, 25 bp, Homo sapien
gctcgtctatcaaaagcacgttgtc

SEQ ID NO: 122830 - DNA, 25 bp, Homo sapien
gctcgtctatcataagcacgttgtc

SEQ ID NO: 122831 - DNA, 25 bp, Homo sapien
ctcgtctctctagaggaacggtctc

SEQ ID NO: 122832 - DNA, 25 bp, Homo sapien
ctcgtctctctacaggaacggtctc

SEQ ID NO: 122833 - DNA, 25 bp, Homo sapien
agttttctacccaagtctgaatgtg

SEQ ID NO: 122834 - DNA, 25 bp, Homo sapien
agttttctaccctagtctgaatgtg

SEQ ID NO: 122835 - DNA, 25 bp, Homo sapien
aagatttactcacctttcggtgggt

SEQ ID NO: 122836 - DNA, 25 bp, Homo sapien
aagatttactcagctttcggtgggt

SEQ ID NO: 122837 - DNA, 25 bp, Homo sapien
agtttccactagtctcgtctcgggc

SEQ ID NO: 122838 - DNA, 25 bp, Homo sapien
agtttccactagactcgtctcgggc

SEQ ID NO: 122839 - DNA, 25 bp, Homo sapien
agtagttttttacttacacgtgttc

SEQ ID NO: 122840 - DNA, 25 bp, Homo sapien
agtagttttttagttacacgtgttc

SEQ ID NO: 122841 - DNA, 25 bp, Homo sapien
gtgtcttcttctacggatcgggtta

SEQ ID NO: 122842 - DNA, 25 bp, Homo sapien
gtgtcttcttcttcggatcgggtta

SEQ ID NO: 122843 - DNA, 25 bp, Homo sapien
tgacgtgtcaaacctaaaaaccggt

SEQ ID NO: 122844 - DNA, 25 bp, Homo sapien
tgacgtgtcaaagctaaaaaccggt

SEQ ID NO: 122845 - DNA, 25 bp, Homo sapien
gcgtccgcccgacgtacgacaaggg

SEQ ID NO: 122846 - DNA, 25 bp, Homo sapien
gcgtccgcccgaggtacgacaaggg

SEQ ID NO: 122847 - DNA, 25 bp, Homo sapien
agtcgtcatcgaagcccagaccggg

SEQ ID NO: 122848 - DNA, 25 bp, Homo sapien
agtcgtcatcgatgcccagaccggg

SEQ ID NO: 122849 - DNA, 25 bp, Homo sapien
aggacctcttcgacgccgtcggcgg

SEQ ID NO: 122850 - DNA, 25 bp, Homo sapien
aggacctcttcgtcgccgtcggcgg

SEQ ID NO: 122851 - DNA, 25 bp, Homo sapien
ccgtcttgttcttcctcgtccgaag

SEQ ID NO: 122852 - DNA, 25 bp, Homo sapien
ccgtcttgttctacctcgtccgaag

SEQ ID NO: 122853 - DNA, 25 bp, Homo sapien
cagagttccgatcgagaactgaaga

SEQ ID NO: 122854 - DNA, 25 bp, Homo sapien
cagagttccgatggagaactgaaga

SEQ ID NO: 122855 - DNA, 25 bp, Homo sapien
aaccacgcagttcgaagaccagtac

SEQ ID NO: 122856 - DNA, 25 bp, Homo sapien
aaccacgcagttggaagaccagtac

SEQ ID NO: 122857 - DNA, 25 bp, Homo sapien
gtaaaacacggaatctttcccgtag

SEQ ID NO: 122858 - DNA, 25 bp, Homo sapien
gtaaaacacggattctttcccgtag

SEQ ID NO: 122859 - DNA, 25 bp, Homo sapien
tacaaccccgactcgtgttgtcctg

SEQ ID NO: 122860 - DNA, 25 bp, Homo sapien
tacaaccccgacacgtgttgtcctg

SEQ ID NO: 122861 - DNA, 25 bp, Homo sapien
gacgggtcgcgcacggtgtctcttc

SEQ ID NO: 122862 - DNA, 25 bp, Homo sapien
gacgggtcgcgctcggtgtctcttc

SEQ ID NO: 122863 - DNA, 25 bp, Homo sapien
tgggggtacgctatccggtccttct

SEQ ID NO: 122864 - DNA, 25 bp, Homo sapien
tgggggtacgctttccggtccttct

SEQ ID NO: 122865 - DNA, 25 bp, Homo sapien
cttgtgtgtgtttcccttgtctccg

SEQ ID NO: 122866 - DNA, 25 bp, Homo sapien
cttgtgtgtgttacccttgtctccg

SEQ ID NO: 122867 - DNA, 25 bp, Homo sapien
accttgtaggggaccgggtagatcc

SEQ ID NO: 122868 - DNA, 25 bp, Homo sapien
accttgtaggggtccgggtagatcc

SEQ ID NO: 122869 - DNA, 25 bp, Homo sapien
agagacgggagtttcgcgagtatca

SEQ ID NO: 122870 - DNA, 25 bp, Homo sapien
agagacgggagtatcgcgagtatca

SEQ ID NO: 122871 - DNA, 25 bp, Homo sapien
gtgtcgttctgtcagtaccataaca

SEQ ID NO: 122872 - DNA, 25 bp, Homo sapien
gtgtcgttctgtgagtaccataaca

SEQ ID NO: 122873 - DNA, 25 bp, Homo sapien
aggagtactcagttagaactcaaag

SEQ ID NO: 122874 - DNA, 25 bp, Homo sapien
aggagtactcagatagaactcaaag

SEQ ID NO: 122875 - DNA, 25 bp, Homo sapien
cggaagaacccaagaaaccagagac

SEQ ID NO: 122876 - DNA, 25 bp, Homo sapien
cggaagaacccatgaaaccagagac

SEQ ID NO: 122877 - DNA, 25 bp, Homo sapien
cccagagagacgactcgacgtcgag

SEQ ID NO: 122878 - DNA, 25 bp, Homo sapien
cccagagagacgtctcgacgtcgag

SEQ ID NO: 122879 - DNA, 25 bp, Homo sapien
gggacaacaaagacccggtatcgag

SEQ ID NO: 122880 - DNA, 25 bp, Homo sapien
gggacaacaaagtcccggtatcgag

SEQ ID NO: 122881 - DNA, 25 bp, Homo sapien
tccagaagagaagtcccgtaggaag

SEQ ID NO: 122882 - DNA, 25 bp, Homo sapien
tccagaagagaactcccgtaggaag

SEQ ID NO: 122883 - DNA, 25 bp, Homo sapien
cacgagtcaaagtccctacatgatt

SEQ ID NO: 122884 - DNA, 25 bp, Homo sapien
cacgagtcaaagaccctacatgatt

SEQ ID NO: 122885 - DNA, 25 bp, Homo sapien
agtaaatgagacgttacacttacgg

SEQ ID NO: 122886 - DNA, 25 bp, Homo sapien
agtaaatgagaccttacacttacgg

SEQ ID NO: 122887 - DNA, 25 bp, Homo sapien
aagatagttcatctgagactctggt

SEQ ID NO: 122888 - DNA, 25 bp, Homo sapien
aagatagttcatgtgagactctggt

SEQ ID NO: 122889 - DNA, 25 bp, Homo sapien
tatcttgtacctaactcgtatttgg

SEQ ID NO: 122890 - DNA, 25 bp, Homo sapien
tatcttgtaccttactcgtatttgg

SEQ ID NO: 122891 - DNA, 25 bp, Homo sapien
gaaaccggtacgacatcttttctgg

SEQ ID NO: 122892 - DNA, 25 bp, Homo sapien
gaaaccggtacgtcatcttttctgg

SEQ ID NO: 122893 - DNA, 25 bp, Homo sapien
gaggaaagtagaaacttttatctcc

SEQ ID NO: 122894 - DNA, 25 bp, Homo sapien
gaggaaagtagatacttttatctcc

SEQ ID NO: 122895 - DNA, 25 bp, Homo sapien
actagaaccgagaattatcattttg

SEQ ID NO: 122896 - DNA, 25 bp, Homo sapien
actagaaccgagtattatcattttg

SEQ ID NO: 122897 - DNA, 25 bp, Homo sapien
atgtggtctaaatctctcagttaaa

SEQ ID NO: 122898 - DNA, 25 bp, Homo sapien
atgtggtctaaaactctcagttaaa

SEQ ID NO: 122899 - DNA, 25 bp, Homo sapien
acgggttagtcctacttacctaaac

SEQ ID NO: 122900 - DNA, 25 bp, Homo sapien
acgggttagtccaacttacctaaac

SEQ ID NO: 122901 - DNA, 25 bp, Homo sapien
taaggtcaccatggtcgtagtgtag

SEQ ID NO: 122902 - DNA, 25 bp, Homo sapien
taaggtcaccatcgtcgtagtgtag

SEQ ID NO: 122903 - DNA, 25 bp, Homo sapien
aggagaccactccagtgatggtgta

SEQ ID NO: 122904 - DNA, 25 bp, Homo sapien
aggagaccactcgagtgatggtgta

SEQ ID NO: 122905 - DNA, 25 bp, Homo sapien
ggaggatctctcgaggacccgtgtc

SEQ ID NO: 122906 - DNA, 25 bp, Homo sapien
ggaggatctctccaggacccgtgtc

SEQ ID NO: 122907 - DNA, 25 bp, Homo sapien
gagtccctcgtcgtagacgggtcgc

SEQ ID NO: 122908 - DNA, 25 bp, Homo sapien
gagtccctcgtcctagacgggtcgc

SEQ ID NO: 122909 - DNA, 25 bp, Homo sapien
actagtctcctgactagcgaggcga

SEQ ID NO: 122910 - DNA, 25 bp, Homo sapien
actagtctcctgtctagcgaggcga

SEQ ID NO: 122911 - DNA, 25 bp, Homo sapien
gtatttatagtatcaacggtgcgtc

SEQ ID NO: 122912 - DNA, 25 bp, Homo sapien
gtatttatagtaacaacggtgcgtc

SEQ ID NO: 122913 - DNA, 25 bp, Homo sapien
tccctgtcgataacaagactagtca

SEQ ID NO: 122914 - DNA, 25 bp, Homo sapien
tccctgtcgatatcaagactagtca

SEQ ID NO: 122915 - DNA, 25 bp, Homo sapien
ccaacactgtagactccgactggaa

SEQ ID NO: 122916 - DNA, 25 bp, Homo sapien
ccaacactgtagtctccgactggaa

SEQ ID NO: 122917 - DNA, 25 bp, Homo sapien
ccggacccgagatctccatgtgaac

SEQ ID NO: 122918 - DNA, 25 bp, Homo sapien
ccggacccgagaactccatgtgaac

SEQ ID NO: 122919 - DNA, 25 bp, Homo sapien
tcgggtattgtctttcatggtcttc

SEQ ID NO: 122920 - DNA, 25 bp, Homo sapien
tcgggtattgtcattcatggtcttc

SEQ ID NO: 122921 - DNA, 25 bp, Homo sapien
gtcgttacgttataatcgtttatct

SEQ ID NO: 122922 - DNA, 25 bp, Homo sapien
gtcgttacgttaaaatcgtttatct

SEQ ID NO: 122923 - DNA, 25 bp, Homo sapien
atcgtatacgtcgttaattatgttc

SEQ ID NO: 122924 - DNA, 25 bp, Homo sapien
atcgtatacgtccttaattatgttc

SEQ ID NO: 122925 - DNA, 25 bp, Homo sapien
cagcatcgaccttcgcatacgttta

SEQ ID NO: 122926 - DNA, 25 bp, Homo sapien
cagcatcgacctacgcatacgttta

SEQ ID NO: 122927 - DNA, 25 bp, Homo sapien
gacgaagactcttagttattttact

SEQ ID NO: 122928 - DNA, 25 bp, Homo sapien
gacgaagactctaagttattttact

SEQ ID NO: 122929 - DNA, 25 bp, Homo sapien
gagggtaaaacaattatcttgtctc

SEQ ID NO: 122930 - DNA, 25 bp, Homo sapien
gagggtaaaacatttatcttgtctc

SEQ ID NO: 122931 - DNA, 25 bp, Homo sapien
gacgtctgccaatttctcttaccga

SEQ ID NO: 122932 - DNA, 25 bp, Homo sapien
gacgtctgccaaattctcttaccga

SEQ ID NO: 122933 - DNA, 25 bp, Homo sapien
ttaacgttatatgttacgtatgtcc

SEQ ID NO: 122934 - DNA, 25 bp, Homo sapien
ttaacgttatatcttacgtatgtcc

SEQ ID NO: 122935 - DNA, 25 bp, Homo sapien
tggttggagataccattgacttctt

SEQ ID NO: 122936 - DNA, 25 bp, Homo sapien
tggttggagatagcattgacttctt

SEQ ID NO: 122937 - DNA, 25 bp, Homo sapien
tgtttatgtacttcgactagatacg

SEQ ID NO: 122938 - DNA, 25 bp, Homo sapien
tgtttatgtactacgactagatacg

SEQ ID NO: 122939 - DNA, 25 bp, Homo sapien
gttatggtgtgtgacgccactgtcc

SEQ ID NO: 122940 - DNA, 25 bp, Homo sapien
gttatggtgtgtcacgccactgtcc

SEQ ID NO: 122941 - DNA, 25 bp, Homo sapien
ggcggtgttacagtacactagtcct

SEQ ID NO: 122942 - DNA, 25 bp, Homo sapien
ggcggtgttacactacactagtcct

SEQ ID NO: 122943 - DNA, 25 bp, Homo sapien
aaagatccgttaatgatcctagtaa

SEQ ID NO: 122944 - DNA, 25 bp, Homo sapien
aaagatccgttattgatcctagtaa

SEQ ID NO: 122945 - DNA, 25 bp, Homo sapien
agatcttaccggtggaaacactcga

SEQ ID NO: 122946 - DNA, 25 bp, Homo sapien
agatcttaccggaggaaacactcga

SEQ ID NO: 122947 - DNA, 25 bp, Homo sapien
gtcgttgtcggacgggaagtcccag

SEQ ID NO: 122948 - DNA, 25 bp, Homo sapien
gtcgttgtcggaggggaagtcccag

SEQ ID NO: 122949 - DNA, 25 bp, Homo sapien
gagtccgtggacgtggatgtccaca

SEQ ID NO: 122950 - DNA, 25 bp, Homo sapien
gagtccgtggacctggatgtccaca

SEQ ID NO: 122951 - DNA, 25 bp, Homo sapien
aagtgtagtcgagtcgggagccaaa

SEQ ID NO: 122952 - DNA, 25 bp, Homo sapien
aagtgtagtcgactcgggagccaaa

SEQ ID NO: 122953 - DNA, 25 bp, Homo sapien
ttgtcgaggtcgaagtcacaaatag

SEQ ID NO: 122954 - DNA, 25 bp, Homo sapien
ttgtcgaggtcgtagtcacaaatag

SEQ ID NO: 122955 - DNA, 25 bp, Homo sapien
cttggttatgggtcgtccatagttc

SEQ ID NO: 122956 - DNA, 25 bp, Homo sapien
cttggttatgggacgtccatagttc

SEQ ID NO: 122957 - DNA, 25 bp, Homo sapien
tcagattaaggagtccctgtagtct

SEQ ID NO: 122958 - DNA, 25 bp, Homo sapien
tcagattaaggactccctgtagtct

SEQ ID NO: 122959 - DNA, 25 bp, Homo sapien
tcaatagtaagagatcgtaatcttc

SEQ ID NO: 122960 - DNA, 25 bp, Homo sapien
tcaatagtaagacatcgtaatcttc

SEQ ID NO: 122961 - DNA, 25 bp, Homo sapien
gtctaacagatgagatcttatatcc

SEQ ID NO: 122962 - DNA, 25 bp, Homo sapien
gtctaacagatgtgatcttatatcc

SEQ ID NO: 122963 - DNA, 25 bp, Homo sapien
gtcgtcagaattgtttctgtagttc

SEQ ID NO: 122964 - DNA, 25 bp, Homo sapien
gtcgtcagaattctttctgtagttc

SEQ ID NO: 122965 - DNA, 25 bp, Homo sapien
gtatagactcttgtagacccgttca

SEQ ID NO: 122966 - DNA, 25 bp, Homo sapien
gtatagactcttctagacccgttca

SEQ ID NO: 122967 - DNA, 25 bp, Homo sapien
gtctcggtacatcgtctcaattcta

SEQ ID NO: 122968 - DNA, 25 bp, Homo sapien
gtctcggtacatggtctcaattcta

SEQ ID NO: 122969 - DNA, 25 bp, Homo sapien
cctatcgtcgtcctctatagacact

SEQ ID NO: 122970 - DNA, 25 bp, Homo sapien
cctatcgtcgtcgtctatagacact

SEQ ID NO: 122971 - DNA, 25 bp, Homo sapien
ccgggtcacccaagtcaaaaacacg

SEQ ID NO: 122972 - DNA, 25 bp, Homo sapien
ccgggtcacccatgtcaaaaacacg

SEQ ID NO: 122973 - DNA, 25 bp, Homo sapien
ccggcggcgtcctgtgaaaagtata

SEQ ID NO: 122974 - DNA, 25 bp, Homo sapien
ccggcggcgtccagtgaaaagtata

SEQ ID NO: 122975 - DNA, 25 bp, Homo sapien
tcataggggctccaaacgaaaagta

SEQ ID NO: 122976 - DNA, 25 bp, Homo sapien
tcataggggctcgaaacgaaaagta

SEQ ID NO: 122977 - DNA, 25 bp, Homo sapien
tagtagatcaggacacgaaaaactt

SEQ ID NO: 122978 - DNA, 25 bp, Homo sapien
tagtagatcaggtcacgaaaaactt

SEQ ID NO: 122979 - DNA, 25 bp, Homo sapien
gtgtgtactgggtcaagaaccactc

SEQ ID NO: 122980 - DNA, 25 bp, Homo sapien
gtgtgtactgggacaagaaccactc

SEQ ID NO: 122981 - DNA, 25 bp, Homo sapien
cgatgaagtaactaataactcttca

SEQ ID NO: 122982 - DNA, 25 bp, Homo sapien
cgatgaagtaacaaataactcttca

SEQ ID NO: 122983 - DNA, 25 bp, Homo sapien
taggtttctctcaattatgtactga

SEQ ID NO: 122984 - DNA, 25 bp, Homo sapien
taggtttctctctattatgtactga

SEQ ID NO: 122985 - DNA, 25 bp, Homo sapien
acggttctctctacgaaaagttgta

SEQ ID NO: 122986 - DNA, 25 bp, Homo sapien
acggttctctcttcgaaaagttgta

SEQ ID NO: 122987 - DNA, 25 bp, Homo sapien
gtttatgactgctgtgcttcgtaag

SEQ ID NO: 122988 - DNA, 25 bp, Homo sapien
gtttatgactgcagtgcttcgtaag

SEQ ID NO: 122989 - DNA, 25 bp, Homo sapien
aactcgacactggaccatagtgatg

SEQ ID NO: 122990 - DNA, 25 bp, Homo sapien
aactcgacactgcaccatagtgatg

SEQ ID NO: 122991 - DNA, 25 bp, Homo sapien
aggacgaagaaggtcctaacgagaa

SEQ ID NO: 122992 - DNA, 25 bp, Homo sapien
aggacgaagaagctcctaacgagaa

SEQ ID NO: 122993 - DNA, 25 bp, Homo sapien
gtagactgggagacctgactcagta

SEQ ID NO: 122994 - DNA, 25 bp, Homo sapien
gtagactgggagtcctgactcagta

SEQ ID NO: 122995 - DNA, 25 bp, Homo sapien
ctatacagggagtctgttctccgtg

SEQ ID NO: 122996 - DNA, 25 bp, Homo sapien
ctatacagggagactgttctccgtg

SEQ ID NO: 122997 - DNA, 25 bp, Homo sapien
ctacttggtgcaatgtctcctacat

SEQ ID NO: 122998 - DNA, 25 bp, Homo sapien
ctacttggtgcattgtctcctacat

SEQ ID NO: 122999 - DNA, 25 bp, Homo sapien
ctgtcggtgccagtggtcctactac

SEQ ID NO: 123000 - DNA, 25 bp, Homo sapien
ctgtcggtgccactggtcctactac

SEQ ID NO: 123001 - DNA, 25 bp, Homo sapien
gtatcattatcatagagacactgac

SEQ ID NO: 123002 - DNA, 25 bp, Homo sapien
gtatcattatcaaagagacactgac

SEQ ID NO: 123003 - DNA, 25 bp, Homo sapien
cgtagcaattcgacggcacgttgta

SEQ ID NO: 123004 - DNA, 25 bp, Homo sapien
cgtagcaattcgtcggcacgttgta

SEQ ID NO: 123005 - DNA, 25 bp, Homo sapien
actcgatggttgatcgtgttttgta

SEQ ID NO: 123006 - DNA, 25 bp, Homo sapien
actcgatggttgttcgtgttttgta

SEQ ID NO: 123007 - DNA, 25 bp, Homo sapien
ttatactgtgtctccgtttcatcga

SEQ ID NO: 123008 - DNA, 25 bp, Homo sapien
ttatactgtgtcaccgtttcatcga

SEQ ID NO: 123009 - DNA, 25 bp, Homo sapien
ttatggtctacgatcatagcatgtg

SEQ ID NO: 123010 - DNA, 25 bp, Homo sapien
ttatggtctacgttcatagcatgtg

SEQ ID NO: 123011 - DNA, 25 bp, Homo sapien
taggagttctgtagaccccctttag

SEQ ID NO: 123012 - DNA, 25 bp, Homo sapien
taggagttctgttgaccccctttag

SEQ ID NO: 123013 - DNA, 25 bp, Homo sapien
aggttcactcggacccaccaggacg

SEQ ID NO: 123014 - DNA, 25 bp, Homo sapien
aggttcactcggtcccaccaggacg

SEQ ID NO: 123015 - DNA, 25 bp, Homo sapien
aagtcttctagatacccagggtgac

SEQ ID NO: 123016 - DNA, 25 bp, Homo sapien
aagtcttctagaaacccagggtgac

SEQ ID NO: 123017 - DNA, 25 bp, Homo sapien
gtcgtctataagagacccttggacc

SEQ ID NO: 123018 - DNA, 25 bp, Homo sapien
gtcgtctataagtgacccttggacc

SEQ ID NO: 123019 - DNA, 25 bp, Homo sapien
gcctcttccccgaggctgagtaggt

SEQ ID NO: 123020 - DNA, 25 bp, Homo sapien
gcctcttccccgtggctgagtaggt

SEQ ID NO: 123021 - DNA, 25 bp, Homo sapien
cgacttcttccctctgagtctgtgg

SEQ ID NO: 123022 - DNA, 25 bp, Homo sapien
cgacttcttcccactgagtctgtgg

SEQ ID NO: 123023 - DNA, 25 bp, Homo sapien
tccttacctgacaccagtagttggg

SEQ ID NO: 123024 - DNA, 25 bp, Homo sapien
tccttacctgactccagtagttggg

SEQ ID NO: 123025 - DNA, 25 bp, Homo sapien
cctaccggcacgacaacggttactt

SEQ ID NO: 123026 - DNA, 25 bp, Homo sapien
cctaccggcacgtcaacggttactt

SEQ ID NO: 123027 - DNA, 25 bp, Homo sapien
cccgtccgtcgaggatccgcgagag

SEQ ID NO: 123028 - DNA, 25 bp, Homo sapien
cccgtccgtcgacgatccgcgagag

SEQ ID NO: 123029 - DNA, 25 bp, Homo sapien
ccactcgtaccgaagatctccgagg

SEQ ID NO: 123030 - DNA, 25 bp, Homo sapien
ccactcgtaccgtagatctccgagg

SEQ ID NO: 123031 - DNA, 25 bp, Homo sapien
tctctgtgagactaggtaacacaga

SEQ ID NO: 123032 - DNA, 25 bp, Homo sapien
tctctgtgagacaaggtaacacaga

SEQ ID NO: 123033 - DNA, 25 bp, Homo sapien
tattaaactttcatacgacgaaggt

SEQ ID NO: 123034 - DNA, 25 bp, Homo sapien
tattaaactttcttacgacgaaggt

SEQ ID NO: 123035 - DNA, 25 bp, Homo sapien
cgaagtacgatctcgatcgaaagag

SEQ ID NO: 123036 - DNA, 25 bp, Homo sapien
cgaagtacgatcacgatcgaaagag

SEQ ID NO: 123037 - DNA, 25 bp, Homo sapien
cgatacctcggaaccgtcttacgtg

SEQ ID NO: 123038 - DNA, 25 bp, Homo sapien
cgatacctcggatccgtcttacgtg

SEQ ID NO: 123039 - DNA, 25 bp, Homo sapien
atagtcggcccgagtcggggcgtgt

SEQ ID NO: 123040 - DNA, 25 bp, Homo sapien
atagtcggcccgtgtcggggcgtgt

SEQ ID NO: 123041 - DNA, 25 bp, Homo sapien
cggagtcccctcagtgggtcgtcgt

SEQ ID NO: 123042 - DNA, 25 bp, Homo sapien
cggagtcccctctgtgggtcgtcgt

SEQ ID NO: 123043 - DNA, 25 bp, Homo sapien
cgtgacgtcctcctctcagcgatgg

SEQ ID NO: 123044 - DNA, 25 bp, Homo sapien
cgtgacgtcctcgtctcagcgatgg

SEQ ID NO: 123045 - DNA, 25 bp, Homo sapien
gctccggtccggttacagaagttag

SEQ ID NO: 123046 - DNA, 25 bp, Homo sapien
gctccggtccggatacagaagttag

SEQ ID NO: 123047 - DNA, 25 bp, Homo sapien
taatttcagtgtccaattcgggaat

SEQ ID NO: 123048 - DNA, 25 bp, Homo sapien
taatttcagtgtgcaattcgggaat

SEQ ID NO: 123049 - DNA, 25 bp, Homo sapien
gtgtcagagaccactcttgtgaact

SEQ ID NO: 123050 - DNA, 25 bp, Homo sapien
gtgtcagagacctctcttgtgaact

SEQ ID NO: 123051 - DNA, 25 bp, Homo sapien
agtacttaacacttcttgttcttcg

SEQ ID NO: 123052 - DNA, 25 bp, Homo sapien
agtacttaacacatcttgttcttcg

SEQ ID NO: 123053 - DNA, 25 bp, Homo sapien
agagcaacgtctaagtttcagttag

SEQ ID NO: 123054 - DNA, 25 bp, Homo sapien
agagcaacgtcttagtttcagttag

SEQ ID NO: 123055 - DNA, 25 bp, Homo sapien
ctagcgtcgctccctcgacgagacg

SEQ ID NO: 123056 - DNA, 25 bp, Homo sapien
ctagcgtcgctcgctcgacgagacg

SEQ ID NO: 123057 - DNA, 25 bp, Homo sapien
ccctgtgggtgtgtgactcagagac

SEQ ID NO: 123058 - DNA, 25 bp, Homo sapien
ccctgtgggtgtctgactcagagac

SEQ ID NO: 123059 - DNA, 25 bp, Homo sapien
ctagtttgagggactgatacacacc

SEQ ID NO: 123060 - DNA, 25 bp, Homo sapien
ctagtttgagggtctgatacacacc

SEQ ID NO: 123061 - DNA, 25 bp, Homo sapien
ggtatttaatggtctacctcacctc

SEQ ID NO: 123062 - DNA, 25 bp, Homo sapien
ggtatttaatggactacctcacctc

SEQ ID NO: 123063 - DNA, 25 bp, Homo sapien
ggtttccccggaactcttgcgcgtc

SEQ ID NO: 123064 - DNA, 25 bp, Homo sapien
ggtttccccggatctcttgcgcgtc

SEQ ID NO: 123065 - DNA, 25 bp, Homo sapien
gttcatctgagactctggtcagtct

SEQ ID NO: 123066 - DNA, 25 bp, Homo sapien
gttcatctgagagtctggtcagtct

SEQ ID NO: 123067 - DNA, 25 bp, Homo sapien
ggtgtcttattgtgccattcatcgt

SEQ ID NO: 123068 - DNA, 25 bp, Homo sapien
ggtgtcttattgagccattcatcgt

SEQ ID NO: 123069 - DNA, 25 bp, Homo sapien
gaggtatcttagaacccatctcctc

SEQ ID NO: 123070 - DNA, 25 bp, Homo sapien
gaggtatcttagtacccatctcctc

SEQ ID NO: 123071 - DNA, 25 bp, Homo sapien
ttgtgtttttgatgacccattctac

SEQ ID NO: 123072 - DNA, 25 bp, Homo sapien
ttgtgtttttgaagacccattctac

SEQ ID NO: 123073 - DNA, 25 bp, Homo sapien
tccacctgttaggagatccaggttc

SEQ ID NO: 123074 - DNA, 25 bp, Homo sapien
tccacctgttagcagatccaggttc

SEQ ID NO: 123075 - DNA, 25 bp, Homo sapien
gtgttacttctcgtatgtgtggttc

SEQ ID NO: 123076 - DNA, 25 bp, Homo sapien
gtgttacttctcctatgtgtggttc

SEQ ID NO: 123077 - DNA, 25 bp, Homo sapien
aaaggccgttctacaggtggtcgga

SEQ ID NO: 123078 - DNA, 25 bp, Homo sapien
aaaggccgttcttcaggtggtcgga

SEQ ID NO: 123079 - DNA, 25 bp, Homo sapien
aaactttcaccctgcgagtagacga

SEQ ID NO: 123080 - DNA, 25 bp, Homo sapien
aaactttcacccagcgagtagacga

SEQ ID NO: 123081 - DNA, 25 bp, Homo sapien
acaatcgtaccagtcgatcgtcgac

SEQ ID NO: 123082 - DNA, 25 bp, Homo sapien
acaatcgtaccactcgatcgtcgac

SEQ ID NO: 123083 - DNA, 25 bp, Homo sapien
gtgacgatgcgacaggtgttaccga

SEQ ID NO: 123084 - DNA, 25 bp, Homo sapien
gtgacgatgcgagaggtgttaccga

SEQ ID NO: 123085 - DNA, 25 bp, Homo sapien
gtgatatgtgaaaggtgacgtccgc

SEQ ID NO: 123086 - DNA, 25 bp, Homo sapien
gtgatatgtgaatggtgacgtccgc

SEQ ID NO: 123087 - DNA, 25 bp, Homo sapien
gatgatggtgcaactgtaggaacac

SEQ ID NO: 123088 - DNA, 25 bp, Homo sapien
gatgatggtgcatctgtaggaacac

SEQ ID NO: 123089 - DNA, 25 bp, Homo sapien
aggggtattgcttcgacgcgcgata

SEQ ID NO: 123090 - DNA, 25 bp, Homo sapien
aggggtattgctacgacgcgcgata

SEQ ID NO: 123091 - DNA, 25 bp, Homo sapien
gggaacgttaatacctcgatctact

SEQ ID NO: 123092 - DNA, 25 bp, Homo sapien
gggaacgttaattcctcgatctact

SEQ ID NO: 123093 - DNA, 25 bp, Homo sapien
tgcggtcagaccaggtccaccctgt

SEQ ID NO: 123094 - DNA, 25 bp, Homo sapien
tgcggtcagacctggtccaccctgt

SEQ ID NO: 123095 - DNA, 25 bp, Homo sapien
cgtgtcctacggatgtccacacaca

SEQ ID NO: 123096 - DNA, 25 bp, Homo sapien
cgtgtcctacggttgtccacacaca

SEQ ID NO: 123097 - DNA, 25 bp, Homo sapien
ccttgaggtctcaaactagcatcca

SEQ ID NO: 123098 - DNA, 25 bp, Homo sapien
ccttgaggtctctaactagcatcca

SEQ ID NO: 123099 - DNA, 25 bp, Homo sapien
cgtggtctctgtgactgaagtcgaa

SEQ ID NO: 123100 - DNA, 25 bp, Homo sapien
cgtggtctctgtcactgaagtcgaa

SEQ ID NO: 123101 - DNA, 25 bp, Homo sapien
ggctagtacccgtcaaagacgtgca

SEQ ID NO: 123102 - DNA, 25 bp, Homo sapien
ggctagtacccgacaaagacgtgca

SEQ ID NO: 123103 - DNA, 25 bp, Homo sapien
ccttacttctcgacacaggtccctg

SEQ ID NO: 123104 - DNA, 25 bp, Homo sapien
ccttacttctcgtcacaggtccctg

SEQ ID NO: 123105 - DNA, 25 bp, Homo sapien
tttttgtctgagactacattcagtg

SEQ ID NO: 123106 - DNA, 25 bp, Homo sapien
tttttgtctgagtctacattcagtg

SEQ ID NO: 123107 - DNA, 25 bp, Homo sapien
taattgtcggtgtacacttacggtt

SEQ ID NO: 123108 - DNA, 25 bp, Homo sapien
taattgtcggtgaacacttacggtt

SEQ ID NO: 123109 - DNA, 25 bp, Homo sapien
ctatgtggtagaagaccctcgactc

SEQ ID NO: 123110 - DNA, 25 bp, Homo sapien
ctatgtggtagatgaccctcgactc

SEQ ID NO: 123111 - DNA, 25 bp, Homo sapien
tggttggtgtcgagacaaccgactc

SEQ ID NO: 123112 - DNA, 25 bp, Homo sapien
tggttggtgtcgtgacaaccgactc

SEQ ID NO: 123113 - DNA, 25 bp, Homo sapien
gtttctagggtccagtcactatacg

SEQ ID NO: 123114 - DNA, 25 bp, Homo sapien
gtttctagggtcgagtcactatacg

SEQ ID NO: 123115 - DNA, 25 bp, Homo sapien
tttggagactatcactagtcctacc

SEQ ID NO: 123116 - DNA, 25 bp, Homo sapien
tttggagactatgactagtcctacc

SEQ ID NO: 123117 - DNA, 25 bp, Homo sapien
tcctgcgtcgggtcacaccgtaact

SEQ ID NO: 123118 - DNA, 25 bp, Homo sapien
tcctgcgtcgggacacaccgtaact

SEQ ID NO: 123119 - DNA, 25 bp, Homo sapien
tccgtcccgggctgaggacgacgtc

SEQ ID NO: 123120 - DNA, 25 bp, Homo sapien
tccgtcccgggcagaggacgacgtc

SEQ ID NO: 123121 - DNA, 25 bp, Homo sapien
tacccttaggggtacgagtgacgtg

SEQ ID NO: 123122 - DNA, 25 bp, Homo sapien
tacccttaggggaacgagtgacgtg

SEQ ID NO: 123123 - DNA, 25 bp, Homo sapien
taagaccgtgggtgagtctcggtac

SEQ ID NO: 123124 - DNA, 25 bp, Homo sapien
taagaccgtgggagagtctcggtac

SEQ ID NO: 123125 - DNA, 25 bp, Homo sapien
ccagaacttagtccagggtacctga

SEQ ID NO: 123126 - DNA, 25 bp, Homo sapien
ccagaacttagtgcagggtacctga

SEQ ID NO: 123127 - DNA, 25 bp, Homo sapien
gaaccagtcgacagctcgtaccaga

SEQ ID NO: 123128 - DNA, 25 bp, Homo sapien
gaaccagtcgactgctcgtaccaga

SEQ ID NO: 123129 - DNA, 25 bp, Homo sapien
tgtactccagtgtcggcgaccggac

SEQ ID NO: 123130 - DNA, 25 bp, Homo sapien
tgtactccagtgacggcgaccggac

SEQ ID NO: 123131 - DNA, 25 bp, Homo sapien
aggctcgtcaggaccgacgaccggc

SEQ ID NO: 123132 - DNA, 25 bp, Homo sapien
aggctcgtcaggtccgacgaccggc

SEQ ID NO: 123133 - DNA, 25 bp, Homo sapien
gtaaggtgaatagtgtcgaaccaac

SEQ ID NO: 123134 - DNA, 25 bp, Homo sapien
gtaaggtgaatactgtcgaaccaac

SEQ ID NO: 123135 - DNA, 25 bp, Homo sapien
tataagtcgaaccctcgtaaccaaa

SEQ ID NO: 123136 - DNA, 25 bp, Homo sapien
tataagtcgaacgctcgtaaccaaa

SEQ ID NO: 123137 - DNA, 25 bp, Homo sapien
accgtgtaacctataacaaagtagt

SEQ ID NO: 123138 - DNA, 25 bp, Homo sapien
accgtgtaacctttaacaaagtagt

SEQ ID NO: 123139 - DNA, 25 bp, Homo sapien
gacccgtctaaaaagacactcagag

SEQ ID NO: 123140 - DNA, 25 bp, Homo sapien
gacccgtctaaatagacactcagag

SEQ ID NO: 123141 - DNA, 25 bp, Homo sapien
gtcccagacacgaagcacaagaaga

SEQ ID NO: 123142 - DNA, 25 bp, Homo sapien
gtcccagacacgtagcacaagaaga

SEQ ID NO: 123143 - DNA, 25 bp, Homo sapien
accaggacacaacgtatacggatga

SEQ ID NO: 123144 - DNA, 25 bp, Homo sapien
accaggacacaaggtatacggatga

SEQ ID NO: 123145 - DNA, 25 bp, Homo sapien
gtgacaatcaaatcgttcgttctga

SEQ ID NO: 123146 - DNA, 25 bp, Homo sapien
gtgacaatcaaaacgttcgttctga

SEQ ID NO: 123147 - DNA, 25 bp, Homo sapien
tgatgacatgacacaattctttatg

SEQ ID NO: 123148 - DNA, 25 bp, Homo sapien
tgatgacatgactcaattctttatg

SEQ ID NO: 123149 - DNA, 25 bp, Homo sapien
catgacatgattagttgtcggtttc

SEQ ID NO: 123150 - DNA, 25 bp, Homo sapien
catgacatgatttgttgtcggtttc

SEQ ID NO: 123151 - DNA, 25 bp, Homo sapien
tgtatttaatgttagtcccattgac

SEQ ID NO: 123152 - DNA, 25 bp, Homo sapien
tgtatttaatgtaagtcccattgac

SEQ ID NO: 123153 - DNA, 25 bp, Homo sapien
ggtacttcaattatacaccaaagtg

SEQ ID NO: 123154 - DNA, 25 bp, Homo sapien
ggtacttcaattttacaccaaagtg

SEQ ID NO: 123155 - DNA, 25 bp, Homo sapien
ccatcagccttccacggagaggtag

SEQ ID NO: 123156 - DNA, 25 bp, Homo sapien
ccatcagccttcgacggagaggtag

SEQ ID NO: 123157 - DNA, 25 bp, Homo sapien
agggaatctaccacgtaaagatacg

SEQ ID NO: 123158 - DNA, 25 bp, Homo sapien
agggaatctacctcgtaaagatacg

SEQ ID NO: 123159 - DNA, 25 bp, Homo sapien
gttgtcccttcgtcctttatgtcgt

SEQ ID NO: 123160 - DNA, 25 bp, Homo sapien
gttgtcccttcgacctttatgtcgt

SEQ ID NO: 123161 - DNA, 25 bp, Homo sapien
tggttttcttttaccctatgtttag

SEQ ID NO: 123162 - DNA, 25 bp, Homo sapien
tggttttctttttccctatgtttag

SEQ ID NO: 123163 - DNA, 25 bp, Homo sapien
tacgtcctcattcctaggtccgtgt

SEQ ID NO: 123164 - DNA, 25 bp, Homo sapien
tacgtcctcattgctaggtccgtgt

SEQ ID NO: 123165 - DNA, 25 bp, Homo sapien
ttgatttccccctttagagttgtct

SEQ ID NO: 123166 - DNA, 25 bp, Homo sapien
ttgatttcccccattagagttgtct

SEQ ID NO: 123167 - DNA, 25 bp, Homo sapien
cccctagtcgtttgtcagatctggt

SEQ ID NO: 123168 - DNA, 25 bp, Homo sapien
cccctagtcgttagtcagatctggt

SEQ ID NO: 123169 - DNA, 25 bp, Homo sapien
acgactctcgacatgtcttgtttgt

SEQ ID NO: 123170 - DNA, 25 bp, Homo sapien
acgactctcgacttgtcttgtttgt

SEQ ID NO: 123171 - DNA, 25 bp, Homo sapien
caaagatctcacgtgacttggttag

SEQ ID NO: 123172 - DNA, 25 bp, Homo sapien
caaagatctcacctgacttggttag

SEQ ID NO: 123173 - DNA, 25 bp, Homo sapien
gaaacagtgtccactttacgtgtag

SEQ ID NO: 123174 - DNA, 25 bp, Homo sapien
gaaacagtgtcctctttacgtgtag

SEQ ID NO: 123175 - DNA, 25 bp, Homo sapien
aagaagactcggaacaattaccgga

SEQ ID NO: 123176 - DNA, 25 bp, Homo sapien
aagaagactcggtacaattaccgga

SEQ ID NO: 123177 - DNA, 25 bp, Homo sapien
cgaaaagagggcacacatggtccat

SEQ ID NO: 123178 - DNA, 25 bp, Homo sapien
cgaaaagagggctcacatggtccat

SEQ ID NO: 123179 - DNA, 25 bp, Homo sapien
gaataaaactcctgtccttggtcca

SEQ ID NO: 123180 - DNA, 25 bp, Homo sapien
gaataaaactccagtccttggtcca

SEQ ID NO: 123181 - DNA, 25 bp, Homo sapien
gaatattcttttcacgtcctgtgga

SEQ ID NO: 123182 - DNA, 25 bp, Homo sapien
gaatattcttttgacgtcctgtgga

SEQ ID NO: 123183 - DNA, 25 bp, Homo sapien
atttcgtgtactgagctttacgatt

SEQ ID NO: 123184 - DNA, 25 bp, Homo sapien
atttcgtgtactcagctttacgatt

SEQ ID NO: 123185 - DNA, 25 bp, Homo sapien
ttatgtgtctgatcggtactgaact

SEQ ID NO: 123186 - DNA, 25 bp, Homo sapien
ttatgtgtctgaacggtactgaact

SEQ ID NO: 123187 - DNA, 25 bp, Homo sapien
tcgtcttattcctgaacctggtcct

SEQ ID NO: 123188 - DNA, 25 bp, Homo sapien
tcgtcttattccagaacctggtcct

SEQ ID NO: 123189 - DNA, 25 bp, Homo sapien
cacaaccactagaatcggtcgtcga

SEQ ID NO: 123190 - DNA, 25 bp, Homo sapien
cacaaccactagtatcggtcgtcga

SEQ ID NO: 123191 - DNA, 25 bp, Homo sapien
gacatcgaccgtttccagaccctat

SEQ ID NO: 123192 - DNA, 25 bp, Homo sapien
gacatcgaccgtatccagaccctat

SEQ ID NO: 123193 - DNA, 25 bp, Homo sapien
cggttccgtcataaacgaccgttac

SEQ ID NO: 123194 - DNA, 25 bp, Homo sapien
cggttccgtcattaacgaccgttac

SEQ ID NO: 123195 - DNA, 25 bp, Homo sapien
gctgtcggggttcagtactcttact

SEQ ID NO: 123196 - DNA, 25 bp, Homo sapien
gctgtcggggttgagtactcttact

SEQ ID NO: 123197 - DNA, 25 bp, Homo sapien
cgtgtcgtgttctagtatgacttct

SEQ ID NO: 123198 - DNA, 25 bp, Homo sapien
cgtgtcgtgttcaagtatgacttct

SEQ ID NO: 123199 - DNA, 25 bp, Homo sapien
actccctttttagagttgtcttcgt

SEQ ID NO: 123200 - DNA, 25 bp, Homo sapien
actccctttttacagttgtcttcgt

SEQ ID NO: 123201 - DNA, 25 bp, Homo sapien
acgtcactgtacgtatatggtcttc

SEQ ID NO: 123202 - DNA, 25 bp, Homo sapien
acgtcactgtacctatatggtcttc

SEQ ID NO: 123203 - DNA, 25 bp, Homo sapien
accttacgttaaagtgtgctacttg

SEQ ID NO: 123204 - DNA, 25 bp, Homo sapien
accttacgttaatgtgtgctacttg

SEQ ID NO: 123205 - DNA, 25 bp, Homo sapien
aaccgtgctactgtgtagggccgta

SEQ ID NO: 123206 - DNA, 25 bp, Homo sapien
aaccgtgctactctgtagggccgta

SEQ ID NO: 123207 - DNA, 25 bp, Homo sapien
ctcctcctgttattcttccggattg

SEQ ID NO: 123208 - DNA, 25 bp, Homo sapien
ctcctcctgttaatcttccggattg

SEQ ID NO: 123209 - DNA, 25 bp, Homo sapien
actttcttggagttctaggggattc

SEQ ID NO: 123210 - DNA, 25 bp, Homo sapien
actttcttggagatctaggggattc

SEQ ID NO: 123211 - DNA, 25 bp, Homo sapien
gatccacactctgctagcatacggt

SEQ ID NO: 123212 - DNA, 25 bp, Homo sapien
gatccacactctcctagcatacggt

SEQ ID NO: 123213 - DNA, 25 bp, Homo sapien
ggaccttaccctacttctcgtcgtt

SEQ ID NO: 123214 - DNA, 25 bp, Homo sapien
ggaccttacccttcttctcgtcgtt

SEQ ID NO: 123215 - DNA, 25 bp, Homo sapien
ctcggcagtcacgtaagctttctca

SEQ ID NO: 123216 - DNA, 25 bp, Homo sapien
ctcggcagtcacctaagctttctca

SEQ ID NO: 123217 - DNA, 25 bp, Homo sapien
tacctagggcactaaacttgttgac

SEQ ID NO: 123218 - DNA, 25 bp, Homo sapien
tacctagggcacaaaacttgttgac

SEQ ID NO: 123219 - DNA, 25 bp, Homo sapien
accccgaggtgcaacgcccagaggg

SEQ ID NO: 123220 - DNA, 25 bp, Homo sapien
accccgaggtgctacgcccagaggg

SEQ ID NO: 123221 - DNA, 25 bp, Homo sapien
cacgtatatcgcaccctggacgggt

SEQ ID NO: 123222 - DNA, 25 bp, Homo sapien
cacgtatatcgctccctggacgggt

SEQ ID NO: 123223 - DNA, 25 bp, Homo sapien
aacaaactacacacgtgtcacagtg

SEQ ID NO: 123224 - DNA, 25 bp, Homo sapien
aacaaactacactcgtgtcacagtg

SEQ ID NO: 123225 - DNA, 25 bp, Homo sapien
acagttctcgtcaaacataacgttg

SEQ ID NO: 123226 - DNA, 25 bp, Homo sapien
acagttctcgtctaacataacgttg

SEQ ID NO: 123227 - DNA, 25 bp, Homo sapien
actggtttagtcaactattaagaca

SEQ ID NO: 123228 - DNA, 25 bp, Homo sapien
actggtttagtctactattaagaca

SEQ ID NO: 123229 - DNA, 25 bp, Homo sapien
cggtgattatctacttaaagaacgt

SEQ ID NO: 123230 - DNA, 25 bp, Homo sapien
cggtgattatcttcttaaagaacgt

SEQ ID NO: 123231 - DNA, 25 bp, Homo sapien
tggatgacttatcgtggtatcgact

SEQ ID NO: 123232 - DNA, 25 bp, Homo sapien
tggatgacttatggtggtatcgact

SEQ ID NO: 123233 - DNA, 25 bp, Homo sapien
cgatcgactgacatcggtagagttt

SEQ ID NO: 123234 - DNA, 25 bp, Homo sapien
cgatcgactgacttcggtagagttt

SEQ ID NO: 123235 - DNA, 25 bp, Homo sapien
aggttcttcactacgaagacttagt

SEQ ID NO: 123236 - DNA, 25 bp, Homo sapien
aggttcttcacttcgaagacttagt

SEQ ID NO: 123237 - DNA, 25 bp, Homo sapien
atttttagtcgtaactaagcactcg

SEQ ID NO: 123238 - DNA, 25 bp, Homo sapien
atttttagtcgttactaagcactcg

SEQ ID NO: 123239 - DNA, 25 bp, Homo sapien
tatatattgtactttagtggcacac

SEQ ID NO: 123240 - DNA, 25 bp, Homo sapien
tatatattgtacattagtggcacac

SEQ ID NO: 123241 - DNA, 25 bp, Homo sapien
tagaagtctcggtcgggtgccgact

SEQ ID NO: 123242 - DNA, 25 bp, Homo sapien
tagaagtctcggacgggtgccgact

SEQ ID NO: 123243 - DNA, 25 bp, Homo sapien
agaacgtcacgtacgggtggctatt

SEQ ID NO: 123244 - DNA, 25 bp, Homo sapien
agaacgtcacgttcgggtggctatt

SEQ ID NO: 123245 - DNA, 25 bp, Homo sapien
gttttccccgacgtgggaaacctat

SEQ ID NO: 123246 - DNA, 25 bp, Homo sapien
gttttccccgacctgggaaacctat

SEQ ID NO: 123247 - DNA, 25 bp, Homo sapien
gtccatttacctttcgtaatgtcag

SEQ ID NO: 123248 - DNA, 25 bp, Homo sapien
gtccatttacctatcgtaatgtcag

SEQ ID NO: 123249 - DNA, 25 bp, Homo sapien
aaagtcccgttaattttcattacgg

SEQ ID NO: 123250 - DNA, 25 bp, Homo sapien
aaagtcccgttatttttcattacgg

SEQ ID NO: 123251 - DNA, 25 bp, Homo sapien
ggggtgacatgtttctttcccacga

SEQ ID NO: 123252 - DNA, 25 bp, Homo sapien
ggggtgacatgtatctttcccacga

SEQ ID NO: 123253 - DNA, 25 bp, Homo sapien
ttgtggatacctgttttccctcaat

SEQ ID NO: 123254 - DNA, 25 bp, Homo sapien
ttgtggatacctcttttccctcaat

SEQ ID NO: 123255 - DNA, 25 bp, Homo sapien
tgttgaaaccctattttccgttgac

SEQ ID NO: 123256 - DNA, 25 bp, Homo sapien
tgttgaaacccttttttccgttgac

SEQ ID NO: 123257 - DNA, 25 bp, Homo sapien
tgaacaaggtcgtcggaacctgacc

SEQ ID NO: 123258 - DNA, 25 bp, Homo sapien
tgaacaaggtcgacggaacctgacc

SEQ ID NO: 123259 - DNA, 25 bp, Homo sapien
tgataagggattatggccctgagtc

SEQ ID NO: 123260 - DNA, 25 bp, Homo sapien
tgataagggattttggccctgagtc

SEQ ID NO: 123261 - DNA, 25 bp, Homo sapien
ccacaggaggttgtagagacttggc

SEQ ID NO: 123262 - DNA, 25 bp, Homo sapien
ccacaggaggttctagagacttggc

SEQ ID NO: 123263 - DNA, 25 bp, Homo sapien
acaggcgagtctcacaggtccggga

SEQ ID NO: 123264 - DNA, 25 bp, Homo sapien
acaggcgagtctgacaggtccggga

SEQ ID NO: 123265 - DNA, 25 bp, Homo sapien
ccgggtagagtcacagaacctgtgg

SEQ ID NO: 123266 - DNA, 25 bp, Homo sapien
ccgggtagagtctcagaacctgtgg

SEQ ID NO: 123267 - DNA, 25 bp, Homo sapien
actgtgtgggtcacaagattatgtc

SEQ ID NO: 123268 - DNA, 25 bp, Homo sapien
actgtgtgggtctcaagattatgtc

SEQ ID NO: 123269 - DNA, 25 bp, Homo sapien
tatctggaccagtaaggagttgtct

SEQ ID NO: 123270 - DNA, 25 bp, Homo sapien
tatctggaccagaaaggagttgtct

SEQ ID NO: 123271 - DNA, 25 bp, Homo sapien
agtcgagaggaatagggacgatctc

SEQ ID NO: 123272 - DNA, 25 bp, Homo sapien
agtcgagaggaaaagggacgatctc

SEQ ID NO: 123273 - DNA, 25 bp, Homo sapien
acagaaggaagaagtgtctgaactc

SEQ ID NO: 123274 - DNA, 25 bp, Homo sapien
acagaaggaagatgtgtctgaactc

SEQ ID NO: 123275 - DNA, 25 bp, Homo sapien
acaatgaggaattggtgacgacgtc

SEQ ID NO: 123276 - DNA, 25 bp, Homo sapien
acaatgaggaataggtgacgacgtc

SEQ ID NO: 123277 - DNA, 25 bp, Homo sapien
ggtcactggtgagaggtagatcttc

SEQ ID NO: 123278 - DNA, 25 bp, Homo sapien
ggtcactggtgacaggtagatcttc

SEQ ID NO: 123279 - DNA, 25 bp, Homo sapien
ggtcgctctgttctagaaactcgcc

SEQ ID NO: 123280 - DNA, 25 bp, Homo sapien
ggtcgctctgttgtagaaactcgcc

SEQ ID NO: 123281 - DNA, 25 bp, Homo sapien
acgcttcataatggataaacctctg

SEQ ID NO: 123282 - DNA, 25 bp, Homo sapien
acgcttcataatcgataaacctctg

SEQ ID NO: 123283 - DNA, 25 bp, Homo sapien
gtggtgagagtttgaagacctcctt

SEQ ID NO: 123284 - DNA, 25 bp, Homo sapien
gtggtgagagttagaagacctcctt

SEQ ID NO: 123285 - DNA, 25 bp, Homo sapien
cttagacgtatgcttgaaacttttt

SEQ ID NO: 123286 - DNA, 25 bp, Homo sapien
cttagacgtatggttgaaacttttt

SEQ ID NO: 123287 - DNA, 25 bp, Homo sapien
ctaacactgagtaggcaccttttat

SEQ ID NO: 123288 - DNA, 25 bp, Homo sapien
ctaacactgagttggcaccttttat

SEQ ID NO: 123289 - DNA, 25 bp, Homo sapien
ccccaaggattctatgccttctact

SEQ ID NO: 123290 - DNA, 25 bp, Homo sapien
ccccaaggattcaatgccttctact

SEQ ID NO: 123291 - DNA, 25 bp, Homo sapien
caacgagattatatgtcgtccaact

SEQ ID NO: 123292 - DNA, 25 bp, Homo sapien
caacgagattatttgtcgtccaact

SEQ ID NO: 123293 - DNA, 25 bp, Homo sapien
ggtaccggttcttctgctaccacct

SEQ ID NO: 123294 - DNA, 25 bp, Homo sapien
ggtaccggttctactgctaccacct

SEQ ID NO: 123295 - DNA, 25 bp, Homo sapien
ggaagtcgaccctgtccatagccaa

SEQ ID NO: 123296 - DNA, 25 bp, Homo sapien
ggaagtcgacccagtccatagccaa

SEQ ID NO: 123297 - DNA, 25 bp, Homo sapien
agagttagtcgaccacaagtttata

SEQ ID NO: 123298 - DNA, 25 bp, Homo sapien
agagttagtcgagcacaagtttata

SEQ ID NO: 123299 - DNA, 25 bp, Homo sapien
cagacgttgtttgaagagcggtatc

SEQ ID NO: 123300 - DNA, 25 bp, Homo sapien
cagacgttgtttcaagagcggtatc

SEQ ID NO: 123301 - DNA, 25 bp, Homo sapien
agtcgatactaacaacaacgaacag

SEQ ID NO: 123302 - DNA, 25 bp, Homo sapien
agtcgatactaagaacaacgaacag

SEQ ID NO: 123303 - DNA, 25 bp, Homo sapien
agtcggtcgaacgtcactggaagac

SEQ ID NO: 123304 - DNA, 25 bp, Homo sapien
agtcggtcgaacctcactggaagac

SEQ ID NO: 123305 - DNA, 25 bp, Homo sapien
cacgtgttgtgattaatgaccggtc

SEQ ID NO: 123306 - DNA, 25 bp, Homo sapien
cacgtgttgtgaataatgaccggtc

SEQ ID NO: 123307 - DNA, 25 bp, Homo sapien
cgaagtttcaaaaggaccgagacgt

SEQ ID NO: 123308 - DNA, 25 bp, Homo sapien
cgaagtttcaaatggaccgagacgt

SEQ ID NO: 123309 - DNA, 25 bp, Homo sapien
agtctccaactcttgtccgtgtagt

SEQ ID NO: 123310 - DNA, 25 bp, Homo sapien
agtctccaactcatgtccgtgtagt

SEQ ID NO: 123311 - DNA, 25 bp, Homo sapien
cgcagagagtgactttgttctgtca

SEQ ID NO: 123312 - DNA, 25 bp, Homo sapien
cgcagagagtgagtttgttctgtca

SEQ ID NO: 123313 - DNA, 25 bp, Homo sapien
tccaggtactctgttccgaattctg

SEQ ID NO: 123314 - DNA, 25 bp, Homo sapien
tccaggtactctcttccgaattctg

SEQ ID NO: 123315 - DNA, 25 bp, Homo sapien
tggtctggcttgtctccgtttcttg

SEQ ID NO: 123316 - DNA, 25 bp, Homo sapien
tggtctggcttgactccgtttcttg

SEQ ID NO: 123317 - DNA, 25 bp, Homo sapien
gagtccggtttaacttttcacctta

SEQ ID NO: 123318 - DNA, 25 bp, Homo sapien
gagtccggtttatcttttcacctta

SEQ ID NO: 123319 - DNA, 25 bp, Homo sapien
aggaccgatacctttataacgtcaa

SEQ ID NO: 123320 - DNA, 25 bp, Homo sapien
aggaccgataccattataacgtcaa

SEQ ID NO: 123321 - DNA, 25 bp, Homo sapien
ggaccagtccgtcgtcaactcactt

SEQ ID NO: 123322 - DNA, 25 bp, Homo sapien
ggaccagtccgtggtcaactcactt

SEQ ID NO: 123323 - DNA, 25 bp, Homo sapien
ggtggacggtcgtgacagtacttcc

SEQ ID NO: 123324 - DNA, 25 bp, Homo sapien
ggtggacggtcgagacagtacttcc

SEQ ID NO: 123325 - DNA, 25 bp, Homo sapien
cgactgcacgggtgtcgaccttacc

SEQ ID NO: 123326 - DNA, 25 bp, Homo sapien
cgactgcacgggagtcgaccttacc

SEQ ID NO: 123327 - DNA, 25 bp, Homo sapien
gtcaggaccgggtacgttaggaaca

SEQ ID NO: 123328 - DNA, 25 bp, Homo sapien
gtcaggaccgggaacgttaggaaca

SEQ ID NO: 123329 - DNA, 25 bp, Homo sapien
gattaagaccaacatttgacgataa

SEQ ID NO: 123330 - DNA, 25 bp, Homo sapien
gattaagaccaagatttgacgataa

SEQ ID NO: 123331 - DNA, 25 bp, Homo sapien
cgctggtaaaaagaggtgcacctta

SEQ ID NO: 123332 - DNA, 25 bp, Homo sapien
cgctggtaaaaacaggtgcacctta

SEQ ID NO: 123333 - DNA, 25 bp, Homo sapien
tttaaaggacctgtgcgtcaagtac

SEQ ID NO: 123334 - DNA, 25 bp, Homo sapien
tttaaaggacctctgcgtcaagtac

SEQ ID NO: 123335 - DNA, 25 bp, Homo sapien
accaaacgtaacagcgctcagagtc

SEQ ID NO: 123336 - DNA, 25 bp, Homo sapien
accaaacgtaactgcgctcagagtc

SEQ ID NO: 123337 - DNA, 25 bp, Homo sapien
tccataaaagaggtggtcttcgacg

SEQ ID NO: 123338 - DNA, 25 bp, Homo sapien
tccataaaagagctggtcttcgacg

SEQ ID NO: 123339 - DNA, 25 bp, Homo sapien
tcactggtaaagaaagcaatttccg

SEQ ID NO: 123340 - DNA, 25 bp, Homo sapien
tcactggtaaagtaagcaatttccg

SEQ ID NO: 123341 - DNA, 25 bp, Homo sapien
aaaaacagaggtgtcataacttctg

SEQ ID NO: 123342 - DNA, 25 bp, Homo sapien
aaaaacagaggtctcataacttctg

SEQ ID NO: 123343 - DNA, 25 bp, Homo sapien
aataatactagaaggctcacaacag

SEQ ID NO: 123344 - DNA, 25 bp, Homo sapien
aataatactagatggctcacaacag

SEQ ID NO: 123345 - DNA, 25 bp, Homo sapien
tttatgacaattgttttcacttaca

SEQ ID NO: 123346 - DNA, 25 bp, Homo sapien
tttatgacaattcttttcacttaca

SEQ ID NO: 123347 - DNA, 25 bp, Homo sapien
cttgctacttttgttaccaatcgag

SEQ ID NO: 123348 - DNA, 25 bp, Homo sapien
cttgctacttttcttaccaatcgag

SEQ ID NO: 123349 - DNA, 25 bp, Homo sapien
catttactcccttcgagaccaaagg

SEQ ID NO: 123350 - DNA, 25 bp, Homo sapien
catttactccctacgagaccaaagg

SEQ ID NO: 123351 - DNA, 25 bp, Homo sapien
tattgtattcacaagacaaaaggtc

SEQ ID NO: 123352 - DNA, 25 bp, Homo sapien
tattgtattcactagacaaaaggtc

SEQ ID NO: 123353 - DNA, 25 bp, Homo sapien
actttgtttacaggaataccaggtt

SEQ ID NO: 123354 - DNA, 25 bp, Homo sapien
actttgtttacacgaataccaggtt

SEQ ID NO: 123355 - DNA, 25 bp, Homo sapien
gttgtacttagcaacgaactccaaa

SEQ ID NO: 123356 - DNA, 25 bp, Homo sapien
gttgtacttagctacgaactccaaa

SEQ ID NO: 123357 - DNA, 25 bp, Homo sapien
gactgtacctcctgaaacccaagtc

SEQ ID NO: 123358 - DNA, 25 bp, Homo sapien
gactgtacctccagaaacccaagtc

SEQ ID NO: 123359 - DNA, 25 bp, Homo sapien
gtatgactcagattagaaacctttc

SEQ ID NO: 123360 - DNA, 25 bp, Homo sapien
gtatgactcagaatagaaacctttc

SEQ ID NO: 123361 - DNA, 25 bp, Homo sapien
tgacgtctgaaggtcactaccctcc

SEQ ID NO: 123362 - DNA, 25 bp, Homo sapien
tgacgtctgaagctcactaccctcc

SEQ ID NO: 123363 - DNA, 25 bp, Homo sapien
gtgaccgtcgattccgacaaccctt

SEQ ID NO: 123364 - DNA, 25 bp, Homo sapien
gtgaccgtcgataccgacaaccctt

SEQ ID NO: 123365 - DNA, 25 bp, Homo sapien
atcgagacgatcatcaaaaatctca

SEQ ID NO: 123366 - DNA, 25 bp, Homo sapien
atcgagacgatcttcaaaaatctca

SEQ ID NO: 123367 - DNA, 25 bp, Homo sapien
tccacgaaccccttaaagaaacagg

SEQ ID NO: 123368 - DNA, 25 bp, Homo sapien
tccacgaaccccataaagaaacagg

SEQ ID NO: 123369 - DNA, 25 bp, Homo sapien
gggtaaccccacttgggattgaggt

SEQ ID NO: 123370 - DNA, 25 bp, Homo sapien
gggtaaccccacatgggattgaggt

SEQ ID NO: 123371 - DNA, 25 bp, Homo sapien
gtcggtccgacctgggacctcggct

SEQ ID NO: 123372 - DNA, 25 bp, Homo sapien
gtcggtccgaccagggacctcggct

SEQ ID NO: 123373 - DNA, 25 bp, Homo sapien
ccggagtagacactgaggacctccc

SEQ ID NO: 123374 - DNA, 25 bp, Homo sapien
ccggagtagacagtgaggacctccc

SEQ ID NO: 123375 - DNA, 25 bp, Homo sapien
aggacccgattcgtggtgcggcccc

SEQ ID NO: 123376 - DNA, 25 bp, Homo sapien
aggacccgattcctggtgcggcccc

SEQ ID NO: 123377 - DNA, 25 bp, Homo sapien
gggcccttgcacgagtccggagcca

SEQ ID NO: 123378 - DNA, 25 bp, Homo sapien
gggcccttgcaccagtccggagcca

SEQ ID NO: 123379 - DNA, 25 bp, Homo sapien
gaacattctctacgtttcgaatgaa

SEQ ID NO: 123380 - DNA, 25 bp, Homo sapien
gaacattctctaggtttcgaatgaa

SEQ ID NO: 123381 - DNA, 25 bp, Homo sapien
tcctcagtgtacgtacacctgtcga

SEQ ID NO: 123382 - DNA, 25 bp, Homo sapien
tcctcagtgtacctacacctgtcga

SEQ ID NO: 123383 - DNA, 25 bp, Homo sapien
ggtgtttacttgttttcccctcagt

SEQ ID NO: 123384 - DNA, 25 bp, Homo sapien
ggtgtttacttgatttcccctcagt

SEQ ID NO: 123385 - DNA, 25 bp, Homo sapien
ccccttcgatgttcccgtcgtgagt

SEQ ID NO: 123386 - DNA, 25 bp, Homo sapien
ccccttcgatgtacccgtcgtgagt

SEQ ID NO: 123387 - DNA, 25 bp, Homo sapien
aaatatttcgaattaccggtcggta

SEQ ID NO: 123388 - DNA, 25 bp, Homo sapien
aaatatttcgaaataccggtcggta

SEQ ID NO: 123389 - DNA, 25 bp, Homo sapien
cgaagttggaggtcactgacgtgtc

SEQ ID NO: 123390 - DNA, 25 bp, Homo sapien
cgaagttggaggacactgacgtgtc

SEQ ID NO: 123391 - DNA, 25 bp, Homo sapien
caggacacgctagagggcatggttc

SEQ ID NO: 123392 - DNA, 25 bp, Homo sapien
caggacacgctacagggcatggttc

SEQ ID NO: 123393 - DNA, 25 bp, Homo sapien
tgtctaaagtgtgcatcgtgtcgta

SEQ ID NO: 123394 - DNA, 25 bp, Homo sapien
tgtctaaagtgtccatcgtgtcgta

SEQ ID NO: 123395 - DNA, 25 bp, Homo sapien
acgtaggtcatgttgtgttacttca

SEQ ID NO: 123396 - DNA, 25 bp, Homo sapien
acgtaggtcatgatgtgttacttca

SEQ ID NO: 123397 - DNA, 25 bp, Homo sapien
ctagagggatcgtcgacggtattaa

SEQ ID NO: 123398 - DNA, 25 bp, Homo sapien
ctagagggatcgacgacggtattaa

SEQ ID NO: 123399 - DNA, 25 bp, Homo sapien
gggaccagatcgacggagtcttgat

SEQ ID NO: 123400 - DNA, 25 bp, Homo sapien
gggaccagatcgtcggagtcttgat

SEQ ID NO: 123401 - DNA, 25 bp, Homo sapien
attgtggaaccagtttgtccatgat

SEQ ID NO: 123402 - DNA, 25 bp, Homo sapien
attgtggaaccactttgtccatgat

SEQ ID NO: 123403 - DNA, 25 bp, Homo sapien
gttgtaacaagaattttcttaccgt

SEQ ID NO: 123404 - DNA, 25 bp, Homo sapien
gttgtaacaagatttttcttaccgt

SEQ ID NO: 123405 - DNA, 25 bp, Homo sapien
aaagagtatcagttgttttatcacc

SEQ ID NO: 123406 - DNA, 25 bp, Homo sapien
aaagagtatcagatgttttatcacc

SEQ ID NO: 123407 - DNA, 25 bp, Homo sapien
caaagataacgatggtttcacaaga

SEQ ID NO: 123408 - DNA, 25 bp, Homo sapien
caaagataacgaaggtttcacaaga

SEQ ID NO: 123409 - DNA, 25 bp, Homo sapien
gatcggatacatgtcgttcaaaagt

SEQ ID NO: 123410 - DNA, 25 bp, Homo sapien
gatcggatacatctcgttcaaaagt

SEQ ID NO: 123411 - DNA, 25 bp, Homo sapien
aaatcgacgtttcaccgtagtataa

SEQ ID NO: 123412 - DNA, 25 bp, Homo sapien
aaatcgacgtttgaccgtagtataa

SEQ ID NO: 123413 - DNA, 25 bp, Homo sapien
tcgtcgataccttcgaaccttatcc

SEQ ID NO: 123414 - DNA, 25 bp, Homo sapien
tcgtcgatacctacgaaccttatcc

SEQ ID NO: 123415 - DNA, 25 bp, Homo sapien
agtcgtaaatacaaaccattggtct

SEQ ID NO: 123416 - DNA, 25 bp, Homo sapien
agtcgtaaatactaaccattggtct

SEQ ID NO: 123417 - DNA, 25 bp, Homo sapien
agtaaactccgagaccttcagaact

SEQ ID NO: 123418 - DNA, 25 bp, Homo sapien
agtaaactccgacaccttcagaact

SEQ ID NO: 123419 - DNA, 25 bp, Homo sapien
taaattgcaccgtttcccgttgtaa

SEQ ID NO: 123420 - DNA, 25 bp, Homo sapien
taaattgcaccgattcccgttgtaa

SEQ ID NO: 123421 - DNA, 25 bp, Homo sapien
ataaagttttcgtattcccctgtaa

SEQ ID NO: 123422 - DNA, 25 bp, Homo sapien
ataaagttttcgaattcccctgtaa

SEQ ID NO: 123423 - DNA, 25 bp, Homo sapien
gtttagtgtctatatccgtgtcgaa

SEQ ID NO: 123424 - DNA, 25 bp, Homo sapien
gtttagtgtctaaatccgtgtcgaa

SEQ ID NO: 123425 - DNA, 25 bp, Homo sapien
aattgtatactcaacaaaacggatc

SEQ ID NO: 123426 - DNA, 25 bp, Homo sapien
aattgtatactctacaaaacggatc

SEQ ID NO: 123427 - DNA, 25 bp, Homo sapien
actgtaaagcccttccgacgacaga

SEQ ID NO: 123428 - DNA, 25 bp, Homo sapien
actgtaaagcccatccgacgacaga

SEQ ID NO: 123429 - DNA, 25 bp, Homo sapien
tacttaatatctactttcgactaaa

SEQ ID NO: 123430 - DNA, 25 bp, Homo sapien
tacttaatatcttctttcgactaaa

SEQ ID NO: 123431 - DNA, 25 bp, Homo sapien
cttgaaacgttgactatacaagata

SEQ ID NO: 123432 - DNA, 25 bp, Homo sapien
cttgaaacgttgtctatacaagata

SEQ ID NO: 123433 - DNA, 25 bp, Homo sapien
ctttgaggacttcgtttacttataa

SEQ ID NO: 123434 - DNA, 25 bp, Homo sapien
ctttgaggacttggtttacttataa

SEQ ID NO: 123435 - DNA, 25 bp, Homo sapien
cctattggaatgagggtacggcaca

SEQ ID NO: 123436 - DNA, 25 bp, Homo sapien
cctattggaatgtgggtacggcaca

SEQ ID NO: 123437 - DNA, 25 bp, Homo sapien
tatccaccttttgaaacggtctaag

SEQ ID NO: 123438 - DNA, 25 bp, Homo sapien
tatccaccttttcaaacggtctaag

SEQ ID NO: 123439 - DNA, 25 bp, Homo sapien
atgccattttacgaaacgtactcag

SEQ ID NO: 123440 - DNA, 25 bp, Homo sapien
atgccattttaccaaacgtactcag

SEQ ID NO: 123441 - DNA, 25 bp, Homo sapien
tagacaaataatggtacggttacca

SEQ ID NO: 123442 - DNA, 25 bp, Homo sapien
tagacaaataatcgtacggttacca

SEQ ID NO: 123443 - DNA, 25 bp, Homo sapien
aactcgagagacacattgccgtccc

SEQ ID NO: 123444 - DNA, 25 bp, Homo sapien
aactcgagagactcattgccgtccc

SEQ ID NO: 123445 - DNA, 25 bp, Homo sapien
aacaggtcgaggacgtccatggccc

SEQ ID NO: 123446 - DNA, 25 bp, Homo sapien
aacaggtcgaggtcgtccatggccc

SEQ ID NO: 123447 - DNA, 25 bp, Homo sapien
accggcggtagcttctcatggaagg

SEQ ID NO: 123448 - DNA, 25 bp, Homo sapien
accggcggtagcatctcatggaagg

SEQ ID NO: 123449 - DNA, 25 bp, Homo sapien
cgtccccgcgggtatggcccaatgt

SEQ ID NO: 123450 - DNA, 25 bp, Homo sapien
cgtccccgcgggaatggcccaatgt

SEQ ID NO: 123451 - DNA, 25 bp, Homo sapien
gggcgacgcctcggaggccgggtgt

SEQ ID NO: 123452 - DNA, 25 bp, Homo sapien
gggcgacgcctccgaggccgggtgt

SEQ ID NO: 123453 - DNA, 25 bp, Homo sapien
agagggagatcgaccctgtctgatt

SEQ ID NO: 123454 - DNA, 25 bp, Homo sapien
agagggagatcgtccctgtctgatt

SEQ ID NO: 123455 - DNA, 25 bp, Homo sapien
aaggactggcagaccctcgcaactt

SEQ ID NO: 123456 - DNA, 25 bp, Homo sapien
aaggactggcagtccctcgcaactt

SEQ ID NO: 123457 - DNA, 25 bp, Homo sapien
aagtcaagtgtgcgcgagcttaatt

SEQ ID NO: 123458 - DNA, 25 bp, Homo sapien
aagtcaagtgtgggcgagcttaatt

SEQ ID NO: 123459 - DNA, 25 bp, Homo sapien
taaacatgtggtgtgtaaccatggt

SEQ ID NO: 123460 - DNA, 25 bp, Homo sapien
taaacatgtggtctgtaaccatggt

SEQ ID NO: 123461 - DNA, 25 bp, Homo sapien
aactagtacttttgtagtcattctg

SEQ ID NO: 123462 - DNA, 25 bp, Homo sapien
aactagtactttagtagtcattctg

SEQ ID NO: 123463 - DNA, 25 bp, Homo sapien
agaggtcgatacttcatgtcctttg

SEQ ID NO: 123464 - DNA, 25 bp, Homo sapien
agaggtcgatacatcatgtcctttg

SEQ ID NO: 123465 - DNA, 25 bp, Homo sapien
cgcggatcaccatgtcactcttact

SEQ ID NO: 123466 - DNA, 25 bp, Homo sapien
cgcggatcaccaagtcactcttact

SEQ ID NO: 123467 - DNA, 25 bp, Homo sapien
ccttcgtctcaggactgaaggtcct

SEQ ID NO: 123468 - DNA, 25 bp, Homo sapien
ccttcgtctcagcactgaaggtcct

SEQ ID NO: 123469 - DNA, 25 bp, Homo sapien
ggtctttacccgagtctgaagtctt

SEQ ID NO: 123470 - DNA, 25 bp, Homo sapien
ggtctttacccgtgtctgaagtctt

SEQ ID NO: 123471 - DNA, 25 bp, Homo sapien
taattttcaccgtcgtactgggggt

SEQ ID NO: 123472 - DNA, 25 bp, Homo sapien
taattttcaccgacgtactgggggt

SEQ ID NO: 123473 - DNA, 25 bp, Homo sapien
cggcatcttccctaactgttcgggc

SEQ ID NO: 123474 - DNA, 25 bp, Homo sapien
cggcatcttcccaaactgttcgggc

SEQ ID NO: 123475 - DNA, 25 bp, Homo sapien
agtgatcctctcaggttcacggtcc

SEQ ID NO: 123476 - DNA, 25 bp, Homo sapien
agtgatcctctctggttcacggtcc

SEQ ID NO: 123477 - DNA, 25 bp, Homo sapien
ccgttctttcccaggagtcgggtcc

SEQ ID NO: 123478 - DNA, 25 bp, Homo sapien
ccgttctttccctggagtcgggtcc

SEQ ID NO: 123479 - DNA, 25 bp, Homo sapien
ggacttcacgaagtcaaaactcgag

SEQ ID NO: 123480 - DNA, 25 bp, Homo sapien
ggacttcacgaactcaaaactcgag

SEQ ID NO: 123481 - DNA, 25 bp, Homo sapien
ggccgtacccgacgtaataaatcgt

SEQ ID NO: 123482 - DNA, 25 bp, Homo sapien
ggccgtacccgaggtaataaatcgt

SEQ ID NO: 123483 - DNA, 25 bp, Homo sapien
aggtcctgaagctacaacacgagag

SEQ ID NO: 123484 - DNA, 25 bp, Homo sapien
aggtcctgaagcaacaacacgagag

SEQ ID NO: 123485 - DNA, 25 bp, Homo sapien
agagaccttaccactaccgggtcgg

SEQ ID NO: 123486 - DNA, 25 bp, Homo sapien
agagaccttacctctaccgggtcgg

SEQ ID NO: 123487 - DNA, 25 bp, Homo sapien
gacgtcttgatctcctcgacaaacg

SEQ ID NO: 123488 - DNA, 25 bp, Homo sapien
gacgtcttgatcacctcgacaaacg

SEQ ID NO: 123489 - DNA, 25 bp, Homo sapien
agtatgtctcctcgacacactgaaa

SEQ ID NO: 123490 - DNA, 25 bp, Homo sapien
agtatgtctcctggacacactgaaa

SEQ ID NO: 123491 - DNA, 25 bp, Homo sapien
tcaaggcgaaccacgcagttcgaag

SEQ ID NO: 123492 - DNA, 25 bp, Homo sapien
tcaaggcgaacctcgcagttcgaag

SEQ ID NO: 123493 - DNA, 25 bp, Homo sapien
gtaatatacaggaattgttacacca

SEQ ID NO: 123494 - DNA, 25 bp, Homo sapien
gtaatatacaggtattgttacacca

SEQ ID NO: 123495 - DNA, 25 bp, Homo sapien
tactagaccgagactttgtttccta

SEQ ID NO: 123496 - DNA, 25 bp, Homo sapien
tactagaccgagtctttgtttccta

SEQ ID NO: 123497 - DNA, 25 bp, Homo sapien
gagagtgacgccttagtggttcctc

SEQ ID NO: 123498 - DNA, 25 bp, Homo sapien
gagagtgacgccatagtggttcctc

SEQ ID NO: 123499 - DNA, 25 bp, Homo sapien
gtgagttgtagcacccggttcctcg

SEQ ID NO: 123500 - DNA, 25 bp, Homo sapien
gtgagttgtagctcccggttcctcg

SEQ ID NO: 123501 - DNA, 25 bp, Homo sapien
ttcttgtgattctctccctgttccg

SEQ ID NO: 123502 - DNA, 25 bp, Homo sapien
ttcttgtgattcactccctgttccg

SEQ ID NO: 123503 - DNA, 25 bp, Homo sapien
gctatgtgtgggtctgtgctgatcc

SEQ ID NO: 123504 - DNA, 25 bp, Homo sapien
gctatgtgtgggactgtgctgatcc

SEQ ID NO: 123505 - DNA, 25 bp, Homo sapien
cttagagggttcttgtcgagttcat

SEQ ID NO: 123506 - DNA, 25 bp, Homo sapien
cttagagggttcatgtcgagttcat

SEQ ID NO: 123507 - DNA, 25 bp, Homo sapien
gtagacgttcgttcgagggaacaca

SEQ ID NO: 123508 - DNA, 25 bp, Homo sapien
gtagacgttcgtacgagggaacaca

SEQ ID NO: 123509 - DNA, 25 bp, Homo sapien
cgtgagtcctgtaaaacctacaacg

SEQ ID NO: 123510 - DNA, 25 bp, Homo sapien
cgtgagtcctgttaaacctacaacg

SEQ ID NO: 123511 - DNA, 25 bp, Homo sapien
acggaaaccccacaatacaaagacg

SEQ ID NO: 123512 - DNA, 25 bp, Homo sapien
acggaaaccccagaatacaaagacg

SEQ ID NO: 123513 - DNA, 25 bp, Homo sapien
tcccggaagacgatctacagcacgt

SEQ ID NO: 123514 - DNA, 25 bp, Homo sapien
tcccggaagacgttctacagcacgt

SEQ ID NO: 123515 - DNA, 25 bp, Homo sapien
gaggacaacaaatacccgggtccgt

SEQ ID NO: 123516 - DNA, 25 bp, Homo sapien
gaggacaacaaaaacccgggtccgt

SEQ ID NO: 123517 - DNA, 25 bp, Homo sapien
aacgagacagaagttccggcgacag

SEQ ID NO: 123518 - DNA, 25 bp, Homo sapien
aacgagacagaacttccggcgacag

SEQ ID NO: 123519 - DNA, 25 bp, Homo sapien
accgtaacaaatgacctacatgaag

SEQ ID NO: 123520 - DNA, 25 bp, Homo sapien
accgtaacaaatcacctacatgaag

SEQ ID NO: 123521 - DNA, 25 bp, Homo sapien
aactaacgaaatgtctacacttcgg

SEQ ID NO: 123522 - DNA, 25 bp, Homo sapien
aactaacgaaatctctacacttcgg

SEQ ID NO: 123523 - DNA, 25 bp, Homo sapien
aagttgaacgatctcggatcggagt

SEQ ID NO: 123524 - DNA, 25 bp, Homo sapien
aagttgaacgatgtcggatcggagt

SEQ ID NO: 123525 - DNA, 25 bp, Homo sapien
tatcttataactcacttctttcggt

SEQ ID NO: 123526 - DNA, 25 bp, Homo sapien
tatcttataactgacttctttcggt

SEQ ID NO: 123527 - DNA, 25 bp, Homo sapien
gaatactaggtgacctttctcctgg

SEQ ID NO: 123528 - DNA, 25 bp, Homo sapien
gaatactaggtgtcctttctcctgg

SEQ ID NO: 123529 - DNA, 25 bp, Homo sapien
gagtgcaacgaaccattttatctcc

SEQ ID NO: 123530 - DNA, 25 bp, Homo sapien
gagtgcaacgaagcattttatctcc

SEQ ID NO: 123531 - DNA, 25 bp, Homo sapien
atggtaccgaaattcttattctgtg

SEQ ID NO: 123532 - DNA, 25 bp, Homo sapien
atggtaccgaaaatcttattctgtg

SEQ ID NO: 123533 - DNA, 25 bp, Homo sapien
catgtggtgaaatttactattctca

SEQ ID NO: 123534 - DNA, 25 bp, Homo sapien
catgtggtgaaaattactattctca

SEQ ID NO: 123535 - DNA, 25 bp, Homo sapien
tacgcggaatcctactgatgtataa

SEQ ID NO: 123536 - DNA, 25 bp, Homo sapien
tacgcggaatccaactgatgtataa

SEQ ID NO: 123537 - DNA, 25 bp, Homo sapien
tagtaggacccatgagtgtagtaac

SEQ ID NO: 123538 - DNA, 25 bp, Homo sapien
tagtaggacccaagagtgtagtaac

SEQ ID NO: 123539 - DNA, 25 bp, Homo sapien
ggaccgacgcaacgacgtgtggtac

SEQ ID NO: 123540 - DNA, 25 bp, Homo sapien
ggaccgacgcaaggacgtgtggtac

SEQ ID NO: 123541 - DNA, 25 bp, Homo sapien
gggaggatccctgaagacacaggtg

SEQ ID NO: 123542 - DNA, 25 bp, Homo sapien
gggaggatccctcaagacacaggtg

SEQ ID NO: 123543 - DNA, 25 bp, Homo sapien
gagttcctctcatccgacggtactc

SEQ ID NO: 123544 - DNA, 25 bp, Homo sapien
gagttcctctcaaccgacggtactc

SEQ ID NO: 123545 - DNA, 25 bp, Homo sapien
aatggtcccgccagacgacggacga

SEQ ID NO: 123546 - DNA, 25 bp, Homo sapien
aatggtcccgcctgacgacggacga

SEQ ID NO: 123547 - DNA, 25 bp, Homo sapien
gtagtgtcgaatcacaagggacgta

SEQ ID NO: 123548 - DNA, 25 bp, Homo sapien
gtagtgtcgaatgacaagggacgta

SEQ ID NO: 123549 - DNA, 25 bp, Homo sapien
atccctcgcgacacaagtagtaaca

SEQ ID NO: 123550 - DNA, 25 bp, Homo sapien
atccctcgcgactcaagtagtaaca

SEQ ID NO: 123551 - DNA, 25 bp, Homo sapien
tcacacacagtgactcacctggaga

SEQ ID NO: 123552 - DNA, 25 bp, Homo sapien
tcacacacagtgtctcacctggaga

SEQ ID NO: 123553 - DNA, 25 bp, Homo sapien
tacccgtcaagacgtcacatgtgaa

SEQ ID NO: 123554 - DNA, 25 bp, Homo sapien
tacccgtcaagaggtcacatgtgaa

SEQ ID NO: 123555 - DNA, 25 bp, Homo sapien
tccgggattgtctgttcctgtttcc

SEQ ID NO: 123556 - DNA, 25 bp, Homo sapien
tccgggattgtcagttcctgtttcc

SEQ ID NO: 123557 - DNA, 25 bp, Homo sapien
tgtcgttacgttataatcgtttatc

SEQ ID NO: 123558 - DNA, 25 bp, Homo sapien
tgtcgttacgttttaatcgtttatc

SEQ ID NO: 123559 - DNA, 25 bp, Homo sapien
atcgaagctatttatgtgtcgtgtc

SEQ ID NO: 123560 - DNA, 25 bp, Homo sapien
atcgaagctattaatgtgtcgtgtc

SEQ ID NO: 123561 - DNA, 25 bp, Homo sapien
aaacaccgactcttcgccacggtta

SEQ ID NO: 123562 - DNA, 25 bp, Homo sapien
aaacaccgactcatcgccacggtta

SEQ ID NO: 123563 - DNA, 25 bp, Homo sapien
aaacgagagctcctacgttaatttt

SEQ ID NO: 123564 - DNA, 25 bp, Homo sapien
aaacgagagctcgtacgttaatttt

SEQ ID NO: 123565 - DNA, 25 bp, Homo sapien
ggtgacagaaaccatgttatttatc

SEQ ID NO: 123566 - DNA, 25 bp, Homo sapien
ggtgacagaaacgatgttatttatc

SEQ ID NO: 123567 - DNA, 25 bp, Homo sapien
agagtctcgaaagatctcttttgac

SEQ ID NO: 123568 - DNA, 25 bp, Homo sapien
agagtctcgaaacatctcttttgac

SEQ ID NO: 123569 - DNA, 25 bp, Homo sapien
gtgtcataaatgtatactatgtcct

SEQ ID NO: 123570 - DNA, 25 bp, Homo sapien
gtgtcataaatgaatactatgtcct

SEQ ID NO: 123571 - DNA, 25 bp, Homo sapien
acgttggtaaatgactttcttactt

SEQ ID NO: 123572 - DNA, 25 bp, Homo sapien
acgttggtaaatcactttcttactt

SEQ ID NO: 123573 - DNA, 25 bp, Homo sapien
gaaagtgtctttccttcactgactt

SEQ ID NO: 123574 - DNA, 25 bp, Homo sapien
gaaagtgtctttgcttcactgactt

SEQ ID NO: 123575 - DNA, 25 bp, Homo sapien
ggattcgtcgttgaggtcacttacc

SEQ ID NO: 123576 - DNA, 25 bp, Homo sapien
ggattcgtcgttcaggtcacttacc

SEQ ID NO: 123577 - DNA, 25 bp, Homo sapien
gtcgcgtggtaagtactctatactt

SEQ ID NO: 123578 - DNA, 25 bp, Homo sapien
gtcgcgtggtaactactctatactt

SEQ ID NO: 123579 - DNA, 25 bp, Homo sapien
aaacatcctgtttgagtccagagag

SEQ ID NO: 123580 - DNA, 25 bp, Homo sapien
aaacatcctgttagagtccagagag

SEQ ID NO: 123581 - DNA, 25 bp, Homo sapien
tatcttccgtgttgtcaaaacgaga

SEQ ID NO: 123582 - DNA, 25 bp, Homo sapien
tatcttccgtgtagtcaaaacgaga

SEQ ID NO: 123583 - DNA, 25 bp, Homo sapien
tggtgtccggaggtcgataccccag

SEQ ID NO: 123584 - DNA, 25 bp, Homo sapien
tggtgtccggagctcgataccccag

SEQ ID NO: 123585 - DNA, 25 bp, Homo sapien
gagtcggcggtttcggtatgtccca

SEQ ID NO: 123586 - DNA, 25 bp, Homo sapien
gagtcggcggttacggtatgtccca

SEQ ID NO: 123587 - DNA, 25 bp, Homo sapien
aggtggagcttaggtacgtccaaca

SEQ ID NO: 123588 - DNA, 25 bp, Homo sapien
aggtggagcttacgtacgtccaaca

SEQ ID NO: 123589 - DNA, 25 bp, Homo sapien
tgtgtcggcgtgagtaccggaatat

SEQ ID NO: 123590 - DNA, 25 bp, Homo sapien
tgtgtcggcgtgtgtaccggaatat

SEQ ID NO: 123591 - DNA, 25 bp, Homo sapien
gctggttcggggtgtcgacaactta

SEQ ID NO: 123592 - DNA, 25 bp, Homo sapien
gctggttcggggagtcgacaactta

SEQ ID NO: 123593 - DNA, 25 bp, Homo sapien
gtggacccgggagtccctcgtcgta

SEQ ID NO: 123594 - DNA, 25 bp, Homo sapien
gtggacccgggactccctcgtcgta

SEQ ID NO: 123595 - DNA, 25 bp, Homo sapien
ccacgagtaagagagtccatctgtc

SEQ ID NO: 123596 - DNA, 25 bp, Homo sapien
ccacgagtaagacagtccatctgtc

SEQ ID NO: 123597 - DNA, 25 bp, Homo sapien
gtcaagagagttaacatttaacttc

SEQ ID NO: 123598 - DNA, 25 bp, Homo sapien
gtcaagagagtttacatttaacttc

SEQ ID NO: 123599 - DNA, 25 bp, Homo sapien
tccacgaaggtggtattctgtaggc

SEQ ID NO: 123600 - DNA, 25 bp, Homo sapien
tccacgaaggtgctattctgtaggc

SEQ ID NO: 123601 - DNA, 25 bp, Homo sapien
agtatgaccttggaggctgtgtgac

SEQ ID NO: 123602 - DNA, 25 bp, Homo sapien
agtatgaccttgcaggctgtgtgac

SEQ ID NO: 123603 - DNA, 25 bp, Homo sapien
gtctgtcgtcatcgaccaccttgtc

SEQ ID NO: 123604 - DNA, 25 bp, Homo sapien
gtctgtcgtcatggaccaccttgtc

SEQ ID NO: 123605 - DNA, 25 bp, Homo sapien
ccgtttgtcgtcgtcagtgtagact

SEQ ID NO: 123606 - DNA, 25 bp, Homo sapien
ccgtttgtcgtcctcagtgtagact

SEQ ID NO: 123607 - DNA, 25 bp, Homo sapien
tccgggtcacccaagtcaaaaacac

SEQ ID NO: 123608 - DNA, 25 bp, Homo sapien
tccgggtcaccctagtcaaaaacac

SEQ ID NO: 123609 - DNA, 25 bp, Homo sapien
ccgggtcgactttgtcgaaaagttc

SEQ ID NO: 123610 - DNA, 25 bp, Homo sapien
ccgggtcgacttagtcgaaaagttc

SEQ ID NO: 123611 - DNA, 25 bp, Homo sapien
ccgggtgctcacaaacgaaaacgat

SEQ ID NO: 123612 - DNA, 25 bp, Homo sapien
ccgggtgctcactaacgaaaacgat

SEQ ID NO: 123613 - DNA, 25 bp, Homo sapien
gagactcgagtcaccataaaactct

SEQ ID NO: 123614 - DNA, 25 bp, Homo sapien
gagactcgagtctccataaaactct

SEQ ID NO: 123615 - DNA, 25 bp, Homo sapien
caggagacagggtccagaagatatc

SEQ ID NO: 123616 - DNA, 25 bp, Homo sapien
caggagacagggaccagaagatatc

SEQ ID NO: 123617 - DNA, 25 bp, Homo sapien
cgggaagagaggaagaacagttctc

SEQ ID NO: 123618 - DNA, 25 bp, Homo sapien
cgggaagagaggtagaacagttctc

SEQ ID NO: 123619 - DNA, 25 bp, Homo sapien
aggtattctccaatacgatttgact

SEQ ID NO: 123620 - DNA, 25 bp, Homo sapien
aggtattctccattacgatttgact

SEQ ID NO: 123621 - DNA, 25 bp, Homo sapien
cgagacttctctacacaaagttagg

SEQ ID NO: 123622 - DNA, 25 bp, Homo sapien
cgagacttctcttcacaaagttagg

SEQ ID NO: 123623 - DNA, 25 bp, Homo sapien
ggttttgacagcatcgacttataag

SEQ ID NO: 123624 - DNA, 25 bp, Homo sapien
ggttttgacagcttcgacttataag

SEQ ID NO: 123625 - DNA, 25 bp, Homo sapien
agattccactgttctgatataatgt

SEQ ID NO: 123626 - DNA, 25 bp, Homo sapien
agattccactgtactgatataatgt

SEQ ID NO: 123627 - DNA, 25 bp, Homo sapien
agaaatacagagactcgacacggaa

SEQ ID NO: 123628 - DNA, 25 bp, Homo sapien
agaaatacagagtctcgacacggaa

SEQ ID NO: 123629 - DNA, 25 bp, Homo sapien
agtagcttaaagacctagactcaga

SEQ ID NO: 123630 - DNA, 25 bp, Homo sapien
agtagcttaaagtcctagactcaga

SEQ ID NO: 123631 - DNA, 25 bp, Homo sapien
cttacagaagagtccgtaccccgtt

SEQ ID NO: 123632 - DNA, 25 bp, Homo sapien
cttacagaagagaccgtaccccgtt

SEQ ID NO: 123633 - DNA, 25 bp, Homo sapien
ttttcgtgtgaaattctacctgtat

SEQ ID NO: 123634 - DNA, 25 bp, Homo sapien
ttttcgtgtgaatttctacctgtat

SEQ ID NO: 123635 - DNA, 25 bp, Homo sapien
tttcgggaccaggaagtcctactct

SEQ ID NO: 123636 - DNA, 25 bp, Homo sapien
tttcgggaccagcaagtcctactct

SEQ ID NO: 123637 - DNA, 25 bp, Homo sapien
tttcattatcagtagagacctacag

SEQ ID NO: 123638 - DNA, 25 bp, Homo sapien
tttcattatcagaagagacctacag

SEQ ID NO: 123639 - DNA, 25 bp, Homo sapien
ctccagattggaggaacgtctagag

SEQ ID NO: 123640 - DNA, 25 bp, Homo sapien
ctccagattggacgaacgtctagag

SEQ ID NO: 123641 - DNA, 25 bp, Homo sapien
actagtaaggttgttgttgttcgta

SEQ ID NO: 123642 - DNA, 25 bp, Homo sapien
actagtaaggttcttgttgttcgta

SEQ ID NO: 123643 - DNA, 25 bp, Homo sapien
tctctaggtgtctccggttcattac

SEQ ID NO: 123644 - DNA, 25 bp, Homo sapien
tctctaggtgtcaccggttcattac

SEQ ID NO: 123645 - DNA, 25 bp, Homo sapien
tttatgtgtccacgttagtcaggtc

SEQ ID NO: 123646 - DNA, 25 bp, Homo sapien
tttatgtgtccaggttagtcaggtc

SEQ ID NO: 123647 - DNA, 25 bp, Homo sapien
tggacgtttgttgagtcccttgtgg

SEQ ID NO: 123648 - DNA, 25 bp, Homo sapien
tggacgtttgttcagtcccttgtgg

SEQ ID NO: 123649 - DNA, 25 bp, Homo sapien
aggagtcacgggacccgactcagga

SEQ ID NO: 123650 - DNA, 25 bp, Homo sapien
aggagtcacgggtcccgactcagga

SEQ ID NO: 123651 - DNA, 25 bp, Homo sapien
tattctctcgtgtccccacggggac

SEQ ID NO: 123652 - DNA, 25 bp, Homo sapien
tattctctcgtgaccccacggggac

SEQ ID NO: 123653 - DNA, 25 bp, Homo sapien
agttccgtaagaaaccgccaggacc

SEQ ID NO: 123654 - DNA, 25 bp, Homo sapien
agttccgtaagataccgccaggacc

SEQ ID NO: 123655 - DNA, 25 bp, Homo sapien
ccctttttccgaaggcagagaccgt

SEQ ID NO: 123656 - DNA, 25 bp, Homo sapien
ccctttttccgatggcagagaccgt

SEQ ID NO: 123657 - DNA, 25 bp, Homo sapien
gacttttcccgttgtgacatgcagt

SEQ ID NO: 123658 - DNA, 25 bp, Homo sapien
gacttttcccgtagtgacatgcagt

SEQ ID NO: 123659 - DNA, 25 bp, Homo sapien
tccctccagtacgtccaacatgagg

SEQ ID NO: 123660 - DNA, 25 bp, Homo sapien
tccctccagtacctccaacatgagg

SEQ ID NO: 123661 - DNA, 25 bp, Homo sapien
caccccgaaacgactaacagtgtca

SEQ ID NO: 123662 - DNA, 25 bp, Homo sapien
caccccgaaacgtctaacagtgtca

SEQ ID NO: 123663 - DNA, 25 bp, Homo sapien
ctccgtcaccgtggacaccgagagg

SEQ ID NO: 123664 - DNA, 25 bp, Homo sapien
ctccgtcaccgtcgacaccgagagg

SEQ ID NO: 123665 - DNA, 25 bp, Homo sapien
ggtcatcgtccgtcgaatccgaggt

SEQ ID NO: 123666 - DNA, 25 bp, Homo sapien
ggtcatcgtccgacgaatccgaggt

SEQ ID NO: 123667 - DNA, 25 bp, Homo sapien
gttctagcagacttcggtaaccaga

SEQ ID NO: 123668 - DNA, 25 bp, Homo sapien
gttctagcagacatcggtaaccaga

SEQ ID NO: 123669 - DNA, 25 bp, Homo sapien
gatatgtaacacattcaagcgaagg

SEQ ID NO: 123670 - DNA, 25 bp, Homo sapien
gatatgtaacactttcaagcgaagg

SEQ ID NO: 123671 - DNA, 25 bp, Homo sapien
cagacgtcattatcgatcgataata

SEQ ID NO: 123672 - DNA, 25 bp, Homo sapien
cagacgtcattaacgatcgataata

SEQ ID NO: 123673 - DNA, 25 bp, Homo sapien
cgtatcgctggtaactctaaactag

SEQ ID NO: 123674 - DNA, 25 bp, Homo sapien
cgtatcgctggttactctaaactag

SEQ ID NO: 123675 - DNA, 25 bp, Homo sapien
tatatgttccagatgccgggagtgt

SEQ ID NO: 123676 - DNA, 25 bp, Homo sapien
tatatgttccagttgccgggagtgt

SEQ ID NO: 123677 - DNA, 25 bp, Homo sapien
cgtcgagccttaaagtcgggtgtgt

SEQ ID NO: 123678 - DNA, 25 bp, Homo sapien
cgtcgagccttatagtcgggtgtgt

SEQ ID NO: 123679 - DNA, 25 bp, Homo sapien
ctggaccctcaccttaggacgtgag

SEQ ID NO: 123680 - DNA, 25 bp, Homo sapien
ctggaccctcacgttaggacgtgag

SEQ ID NO: 123681 - DNA, 25 bp, Homo sapien
ccccggcacgtctacatagagttag

SEQ ID NO: 123682 - DNA, 25 bp, Homo sapien
ccccggcacgtcaacatagagttag

SEQ ID NO: 123683 - DNA, 25 bp, Homo sapien
ttgagtgcgactcaatcggagaacg

SEQ ID NO: 123684 - DNA, 25 bp, Homo sapien
ttgagtgcgactgaatcggagaacg

SEQ ID NO: 123685 - DNA, 25 bp, Homo sapien
tgtcacggaccgaaacgtgggacac

SEQ ID NO: 123686 - DNA, 25 bp, Homo sapien
tgtcacggaccgtaacgtgggacac

SEQ ID NO: 123687 - DNA, 25 bp, Homo sapien
gtacgtcaacacgtctgttcctccg

SEQ ID NO: 123688 - DNA, 25 bp, Homo sapien
gtacgtcaacacctctgttcctccg

SEQ ID NO: 123689 - DNA, 25 bp, Homo sapien
gatcaatcacatatacgacgtcacg

SEQ ID NO: 123690 - DNA, 25 bp, Homo sapien
gatcaatcacatttacgacgtcacg

SEQ ID NO: 123691 - DNA, 25 bp, Homo sapien
cgagatcggtctccacgtcggacgt

SEQ ID NO: 123692 - DNA, 25 bp, Homo sapien
cgagatcggtctgcacgtcggacgt

SEQ ID NO: 123693 - DNA, 25 bp, Homo sapien
ttagtggtcggcttactcggagact

SEQ ID NO: 123694 - DNA, 25 bp, Homo sapien
ttagtggtcggcatactcggagact

SEQ ID NO: 123695 - DNA, 25 bp, Homo sapien
tattgtagagggagatacactccgt

SEQ ID NO: 123696 - DNA, 25 bp, Homo sapien
tattgtagagggtgatacactccgt

SEQ ID NO: 123697 - DNA, 25 bp, Homo sapien
gtagttttaaggtcgccactacccg

SEQ ID NO: 123698 - DNA, 25 bp, Homo sapien
gtagttttaaggacgccactacccg

SEQ ID NO: 123699 - DNA, 25 bp, Homo sapien
gtttcttctcagcaccttagccgac

SEQ ID NO: 123700 - DNA, 25 bp, Homo sapien
gtttcttctcaggaccttagccgac

SEQ ID NO: 123701 - DNA, 25 bp, Homo sapien
gttacattgaaaatctgtcgagtct

SEQ ID NO: 123702 - DNA, 25 bp, Homo sapien
gttacattgaaattctgtcgagtct

SEQ ID NO: 123703 - DNA, 25 bp, Homo sapien
gtcaattcggagtcgatgtcgatgt

SEQ ID NO: 123704 - DNA, 25 bp, Homo sapien
gtcaattcggagacgatgtcgatgt

SEQ ID NO: 123705 - DNA, 25 bp, Homo sapien
gaccgttacttgactccatgtcaca

SEQ ID NO: 123706 - DNA, 25 bp, Homo sapien
gaccgttacttgtctccatgtcaca

SEQ ID NO: 123707 - DNA, 25 bp, Homo sapien
gtcggtgttgtgttaccccatttac

SEQ ID NO: 123708 - DNA, 25 bp, Homo sapien
gtcggtgttgtgataccccatttac

SEQ ID NO: 123709 - DNA, 25 bp, Homo sapien
gtttaccggttagaatccagtttac

SEQ ID NO: 123710 - DNA, 25 bp, Homo sapien
gtttaccggttacaatccagtttac

SEQ ID NO: 123711 - DNA, 25 bp, Homo sapien
tgttacttctcgtatgtgtggttcg

SEQ ID NO: 123712 - DNA, 25 bp, Homo sapien
tgttacttctcgaatgtgtggttcg

SEQ ID NO: 123713 - DNA, 25 bp, Homo sapien
ggtcgacttctagcaggtttcgtga

SEQ ID NO: 123714 - DNA, 25 bp, Homo sapien
ggtcgacttctaccaggtttcgtga

SEQ ID NO: 123715 - DNA, 25 bp, Homo sapien
cgtttctactcatcgtgtatacgaa

SEQ ID NO: 123716 - DNA, 25 bp, Homo sapien
cgtttctactcaacgtgtatacgaa

SEQ ID NO: 123717 - DNA, 25 bp, Homo sapien
taattgtactcaactagatgtgact

SEQ ID NO: 123718 - DNA, 25 bp, Homo sapien
taattgtactcatctagatgtgact

SEQ ID NO: 123719 - DNA, 25 bp, Homo sapien
ttaatccgttgagtagttacgcgat

SEQ ID NO: 123720 - DNA, 25 bp, Homo sapien
ttaatccgttgactagttacgcgat

SEQ ID NO: 123721 - DNA, 25 bp, Homo sapien
gattcgtgaaaggtgacgtacgatc

SEQ ID NO: 123722 - DNA, 25 bp, Homo sapien
gattcgtgaaagctgacgtacgatc

SEQ ID NO: 123723 - DNA, 25 bp, Homo sapien
gtaggatttgacaacttatcaacta

SEQ ID NO: 123724 - DNA, 25 bp, Homo sapien
gtaggatttgactacttatcaacta

SEQ ID NO: 123725 - DNA, 25 bp, Homo sapien
cacgagatgtttcctattgtccata

SEQ ID NO: 123726 - DNA, 25 bp, Homo sapien
cacgagatgtttgctattgtccata

SEQ ID NO: 123727 - DNA, 25 bp, Homo sapien
gagagttagaacagttcgacctact

SEQ ID NO: 123728 - DNA, 25 bp, Homo sapien
gagagttagaactgttcgacctact

SEQ ID NO: 123729 - DNA, 25 bp, Homo sapien
gtgcggtcagaccaggtccaccctg

SEQ ID NO: 123730 - DNA, 25 bp, Homo sapien
gtgcggtcagacgaggtccaccctg

SEQ ID NO: 123731 - DNA, 25 bp, Homo sapien
tcggtccgtcgaggagacacaccca

SEQ ID NO: 123732 - DNA, 25 bp, Homo sapien
tcggtccgtcgacgagacacaccca

SEQ ID NO: 123733 - DNA, 25 bp, Homo sapien
ccatgagcgagtatcctaccatcca

SEQ ID NO: 123734 - DNA, 25 bp, Homo sapien
ccatgagcgagtttcctaccatcca

SEQ ID NO: 123735 - DNA, 25 bp, Homo sapien
cgtaacacgtttcacaaagtcgtaa

SEQ ID NO: 123736 - DNA, 25 bp, Homo sapien
cgtaacacgtttgacaaagtcgtaa

SEQ ID NO: 123737 - DNA, 25 bp, Homo sapien
ctcgacccgttcgaagacgtcgaac

SEQ ID NO: 123738 - DNA, 25 bp, Homo sapien
ctcgacccgttccaagacgtcgaac

SEQ ID NO: 123739 - DNA, 25 bp, Homo sapien
cctttatctcctaacaggactcggg

SEQ ID NO: 123740 - DNA, 25 bp, Homo sapien
cctttatctccttacaggactcggg

SEQ ID NO: 123741 - DNA, 25 bp, Homo sapien
tctttttcagagaccactttagagt

SEQ ID NO: 123742 - DNA, 25 bp, Homo sapien
tctttttcagagtccactttagagt

SEQ ID NO: 123743 - DNA, 25 bp, Homo sapien
tccaattgagttcgacacttcgggt

SEQ ID NO: 123744 - DNA, 25 bp, Homo sapien
tccaattgagttggacacttcgggt

SEQ ID NO: 123745 - DNA, 25 bp, Homo sapien
caattacggtagttgacacgccatc

SEQ ID NO: 123746 - DNA, 25 bp, Homo sapien
caattacggtagatgacacgccatc

SEQ ID NO: 123747 - DNA, 25 bp, Homo sapien
aggttctcggtagtgacaggcactc

SEQ ID NO: 123748 - DNA, 25 bp, Homo sapien
aggttctcggtactgacaggcactc

SEQ ID NO: 123749 - DNA, 25 bp, Homo sapien
gttttagagggtacgtcacactagt

SEQ ID NO: 123750 - DNA, 25 bp, Homo sapien
gttttagagggttcgtcacactagt

SEQ ID NO: 123751 - DNA, 25 bp, Homo sapien
gtttaaggatagatagtcgtacacc

SEQ ID NO: 123752 - DNA, 25 bp, Homo sapien
gtttaaggatagttagtcgtacacc

SEQ ID NO: 123753 - DNA, 25 bp, Homo sapien
acgctttcgggttctactaccctac

SEQ ID NO: 123754 - DNA, 25 bp, Homo sapien
acgctttcgggtactactaccctac

SEQ ID NO: 123755 - DNA, 25 bp, Homo sapien
accgcatcggtgacaggtagacgtc

SEQ ID NO: 123756 - DNA, 25 bp, Homo sapien
accgcatcggtgtcaggtagacgtc

SEQ ID NO: 123757 - DNA, 25 bp, Homo sapien
ctaccttaggtgtatcgagtgcgtc

SEQ ID NO: 123758 - DNA, 25 bp, Homo sapien
ctaccttaggtgaatcgagtgcgtc

SEQ ID NO: 123759 - DNA, 25 bp, Homo sapien
cgtaaacttgggtcagtgtgtcgtc

SEQ ID NO: 123760 - DNA, 25 bp, Homo sapien
cgtaaacttgggacagtgtgtcgtc

SEQ ID NO: 123761 - DNA, 25 bp, Homo sapien
acgagactgttggagggtccgtgtt

SEQ ID NO: 123762 - DNA, 25 bp, Homo sapien
acgagactgttgcagggtccgtgtt

SEQ ID NO: 123763 - DNA, 25 bp, Homo sapien
acgaaccagtgcatcctatctgtac

SEQ ID NO: 123764 - DNA, 25 bp, Homo sapien
acgaaccagtgcttcctatctgtac

SEQ ID NO: 123765 - DNA, 25 bp, Homo sapien
gtgacaccacggtccgtccgtggac

SEQ ID NO: 123766 - DNA, 25 bp, Homo sapien
gtgacaccacggaccgtccgtggac

SEQ ID NO: 123767 - DNA, 25 bp, Homo sapien
ggaccacactcgacggacgcgggct

SEQ ID NO: 123768 - DNA, 25 bp, Homo sapien
ggaccacactcgtcggacgcgggct

SEQ ID NO: 123769 - DNA, 25 bp, Homo sapien
taggacgtccatgttcgacctccac

SEQ ID NO: 123770 - DNA, 25 bp, Homo sapien
taggacgtccatcttcgacctccac

SEQ ID NO: 123771 - DNA, 25 bp, Homo sapien
ttagtacgtcaagtccgtgagcaaa

SEQ ID NO: 123772 - DNA, 25 bp, Homo sapien
ttagtacgtcaactccgtgagcaaa

SEQ ID NO: 123773 - DNA, 25 bp, Homo sapien
ctcgtgacatctcgtacagaagaag

SEQ ID NO: 123774 - DNA, 25 bp, Homo sapien
ctcgtgacatctggtacagaagaag

SEQ ID NO: 123775 - DNA, 25 bp, Homo sapien
gacctgtcattgttaacatctatag

SEQ ID NO: 123776 - DNA, 25 bp, Homo sapien
gacctgtcattgataacatctatag

SEQ ID NO: 123777 - DNA, 25 bp, Homo sapien
gtccttcgacgtaaaacacaaatag

SEQ ID NO: 123778 - DNA, 25 bp, Homo sapien
gtccttcgacgttaaacacaaatag

SEQ ID NO: 123779 - DNA, 25 bp, Homo sapien
atcacggtgcatcgatacggataac

SEQ ID NO: 123780 - DNA, 25 bp, Homo sapien
atcacggtgcatggatacggataac

SEQ ID NO: 123781 - DNA, 25 bp, Homo sapien
gggacaactcataaaactcgcttga

SEQ ID NO: 123782 - DNA, 25 bp, Homo sapien
gggacaactcattaaactcgcttga

SEQ ID NO: 123783 - DNA, 25 bp, Homo sapien
gacatgtctgcatatctacttatag

SEQ ID NO: 123784 - DNA, 25 bp, Homo sapien
gacatgtctgcaaatctacttatag

SEQ ID NO: 123785 - DNA, 25 bp, Homo sapien
cagaaattattgaatgtccgtttac

SEQ ID NO: 123786 - DNA, 25 bp, Homo sapien
cagaaattattgtatgtccgtttac

SEQ ID NO: 123787 - DNA, 25 bp, Homo sapien
taaattaagtcttattctctattga

SEQ ID NO: 123788 - DNA, 25 bp, Homo sapien
taaattaagtctaattctctattga

SEQ ID NO: 123789 - DNA, 25 bp, Homo sapien
gttcatcaagtcaaaccttataagg

SEQ ID NO: 123790 - DNA, 25 bp, Homo sapien
gttcatcaagtctaaccttataagg

SEQ ID NO: 123791 - DNA, 25 bp, Homo sapien
accactcaactttcccgcgaagaag

SEQ ID NO: 123792 - DNA, 25 bp, Homo sapien
accactcaacttacccgcgaagaag

SEQ ID NO: 123793 - DNA, 25 bp, Homo sapien
ccacctgaagtcacccgaaagaacg

SEQ ID NO: 123794 - DNA, 25 bp, Homo sapien
ccacctgaagtctcccgaaagaacg

SEQ ID NO: 123795 - DNA, 25 bp, Homo sapien
tttcaactcgtgtcctatacttgtc

SEQ ID NO: 123796 - DNA, 25 bp, Homo sapien
tttcaactcgtgacctatacttgtc

SEQ ID NO: 123797 - DNA, 25 bp, Homo sapien
ggttcttttagtttcaccatgttaa

SEQ ID NO: 123798 - DNA, 25 bp, Homo sapien
ggttcttttagtatcaccatgttaa

SEQ ID NO: 123799 - DNA, 25 bp, Homo sapien
tgccgtcgattacctacgtggaggt

SEQ ID NO: 123800 - DNA, 25 bp, Homo sapien
tgccgtcgattagctacgtggaggt

SEQ ID NO: 123801 - DNA, 25 bp, Homo sapien
gttttcctccttacgtacagttgtt

SEQ ID NO: 123802 - DNA, 25 bp, Homo sapien
gttttcctcctttcgtacagttgtt

SEQ ID NO: 123803 - DNA, 25 bp, Homo sapien
cgctccctgtctttctaataagtgt

SEQ ID NO: 123804 - DNA, 25 bp, Homo sapien
cgctccctgtctatctaataagtgt

SEQ ID NO: 123805 - DNA, 25 bp, Homo sapien
cccacctgtctacgtctctttgagt

SEQ ID NO: 123806 - DNA, 25 bp, Homo sapien
cccacctgtctaggtctctttgagt

SEQ ID NO: 123807 - DNA, 25 bp, Homo sapien
tctcaaatgtcagtgacttgttcag

SEQ ID NO: 123808 - DNA, 25 bp, Homo sapien
tctcaaatgtcactgacttgttcag

SEQ ID NO: 123809 - DNA, 25 bp, Homo sapien
cgaagaggtcccgtcgtttcgcgag

SEQ ID NO: 123810 - DNA, 25 bp, Homo sapien
cgaagaggtcccctcgtttcgcgag

SEQ ID NO: 123811 - DNA, 25 bp, Homo sapien
agaacctgtgccatcgtctccggag

SEQ ID NO: 123812 - DNA, 25 bp, Homo sapien
agaacctgtgccttcgtctccggag

SEQ ID NO: 123813 - DNA, 25 bp, Homo sapien
aataaaggtgtcacaattgtacctt

SEQ ID NO: 123814 - DNA, 25 bp, Homo sapien
aataaaggtgtctcaattgtacctt

SEQ ID NO: 123815 - DNA, 25 bp, Homo sapien
taaaattcggtcgtgtggtacctac

SEQ ID NO: 123816 - DNA, 25 bp, Homo sapien
taaaattcggtcctgtggtacctac

SEQ ID NO: 123817 - DNA, 25 bp, Homo sapien
ataatatttcttacgtctgtattta

SEQ ID NO: 123818 - DNA, 25 bp, Homo sapien
ataatatttctttcgtctgtattta

SEQ ID NO: 123819 - DNA, 25 bp, Homo sapien
aactttgtctatagactttcgtgtt

SEQ ID NO: 123820 - DNA, 25 bp, Homo sapien
aactttgtctattgactttcgtgtt

SEQ ID NO: 123821 - DNA, 25 bp, Homo sapien
attactgttcgttaacggtccgagc

SEQ ID NO: 123822 - DNA, 25 bp, Homo sapien
attactgttcgtaaacggtccgagc

SEQ ID NO: 123823 - DNA, 25 bp, Homo sapien
aatgtttatttcgatacctcggtgg

SEQ ID NO: 123824 - DNA, 25 bp, Homo sapien
aatgtttatttccatacctcggtgg

SEQ ID NO: 123825 - DNA, 25 bp, Homo sapien
gacggtcagacagatcggggtttct

SEQ ID NO: 123826 - DNA, 25 bp, Homo sapien
gacggtcagacacatcggggtttct

SEQ ID NO: 123827 - DNA, 25 bp, Homo sapien
gtcctgacctactttactagaacca

SEQ ID NO: 123828 - DNA, 25 bp, Homo sapien
gtcctgacctacattactagaacca

SEQ ID NO: 123829 - DNA, 25 bp, Homo sapien
ttgtgtcccagtaaacacagtcgac

SEQ ID NO: 123830 - DNA, 25 bp, Homo sapien
ttgtgtcccagttaacacagtcgac

SEQ ID NO: 123831 - DNA, 25 bp, Homo sapien
gagctgtcggggttcagtactctta

SEQ ID NO: 123832 - DNA, 25 bp, Homo sapien
gagctgtcggggatcagtactctta

SEQ ID NO: 123833 - DNA, 25 bp, Homo sapien
gcgtgtgtggccagtgtatctgtct

SEQ ID NO: 123834 - DNA, 25 bp, Homo sapien
gcgtgtgtggcctgtgtatctgtct

SEQ ID NO: 123835 - DNA, 25 bp, Homo sapien
cactccctttttagagttgtcttcg

SEQ ID NO: 123836 - DNA, 25 bp, Homo sapien
cactcccttttttgagttgtcttcg

SEQ ID NO: 123837 - DNA, 25 bp, Homo sapien
acgtcaccgtactgagatgatctta

SEQ ID NO: 123838 - DNA, 25 bp, Homo sapien
acgtcaccgtacagagatgatctta

SEQ ID NO: 123839 - DNA, 25 bp, Homo sapien
cccttatgtacaggacgtcgatttg

SEQ ID NO: 123840 - DNA, 25 bp, Homo sapien
cccttatgtacacgacgtcgatttg

SEQ ID NO: 123841 - DNA, 25 bp, Homo sapien
gaacaggatattagtaggaccctag

SEQ ID NO: 123842 - DNA, 25 bp, Homo sapien
gaacaggatatttgtaggaccctag

SEQ ID NO: 123843 - DNA, 25 bp, Homo sapien
ctgctccttactttttctggttgag

SEQ ID NO: 123844 - DNA, 25 bp, Homo sapien
ctgctccttactatttctggttgag

SEQ ID NO: 123845 - DNA, 25 bp, Homo sapien
cttttttggacttagaggcgagttc

SEQ ID NO: 123846 - DNA, 25 bp, Homo sapien
cttttttggactaagaggcgagttc

SEQ ID NO: 123847 - DNA, 25 bp, Homo sapien
tctcccatctcgagcgagtacgact

SEQ ID NO: 123848 - DNA, 25 bp, Homo sapien
tctcccatctcgtgcgagtacgact

SEQ ID NO: 123849 - DNA, 25 bp, Homo sapien
ggtccgtctcccttgatgtgtcgtt

SEQ ID NO: 123850 - DNA, 25 bp, Homo sapien
ggtccgtctcccatgatgtgtcgtt

SEQ ID NO: 123851 - DNA, 25 bp, Homo sapien
cggtcatcccgttaggacttcttac

SEQ ID NO: 123852 - DNA, 25 bp, Homo sapien
cggtcatcccgtaaggacttcttac

SEQ ID NO: 123853 - DNA, 25 bp, Homo sapien
aacctgggacgataagcatgttgat

SEQ ID NO: 123854 - DNA, 25 bp, Homo sapien
aacctgggacgaaaagcatgttgat

SEQ ID NO: 123855 - DNA, 25 bp, Homo sapien
cactcgtgggcgaagaaccaagggt

SEQ ID NO: 123856 - DNA, 25 bp, Homo sapien
cactcgtgggcgtagaaccaagggt

SEQ ID NO: 123857 - DNA, 25 bp, Homo sapien
tcctcgtttccgtgacccgaagggt

SEQ ID NO: 123858 - DNA, 25 bp, Homo sapien
tcctcgtttccgagacccgaagggt

SEQ ID NO: 123859 - DNA, 25 bp, Homo sapien
tcctctaccaacacgacgtcaagtg

SEQ ID NO: 123860 - DNA, 25 bp, Homo sapien
tcctctaccaactcgacgtcaagtg

SEQ ID NO: 123861 - DNA, 25 bp, Homo sapien
aacgtctccgacaaagtagtcattt

SEQ ID NO: 123862 - DNA, 25 bp, Homo sapien
aacgtctccgactaagtagtcattt

SEQ ID NO: 123863 - DNA, 25 bp, Homo sapien
actgagattgacaacttgtgagtca

SEQ ID NO: 123864 - DNA, 25 bp, Homo sapien
actgagattgactacttgtgagtca

SEQ ID NO: 123865 - DNA, 25 bp, Homo sapien
cggacgatcatcttacgttggtgaa

SEQ ID NO: 123866 - DNA, 25 bp, Homo sapien
cggacgatcatcatacgttggtgaa

SEQ ID NO: 123867 - DNA, 25 bp, Homo sapien
cgtggtaggactctctgtggtaaga

SEQ ID NO: 123868 - DNA, 25 bp, Homo sapien
cgtggtaggactgtctgtggtaaga

SEQ ID NO: 123869 - DNA, 25 bp, Homo sapien
gggagtcgataccttacggtgataa

SEQ ID NO: 123870 - DNA, 25 bp, Homo sapien
gggagtcgatacgttacggtgataa

SEQ ID NO: 123871 - DNA, 25 bp, Homo sapien
gaagactatcttacgaaactatagt

SEQ ID NO: 123872 - DNA, 25 bp, Homo sapien
gaagactatctttcgaaactatagt

SEQ ID NO: 123873 - DNA, 25 bp, Homo sapien
tttttagtcgtaactaagcactcgt

SEQ ID NO: 123874 - DNA, 25 bp, Homo sapien
tttttagtcgtatctaagcactcgt

SEQ ID NO: 123875 - DNA, 25 bp, Homo sapien
tatattgtactttagtggcacacgt

SEQ ID NO: 123876 - DNA, 25 bp, Homo sapien
tatattgtacttaagtggcacacgt

SEQ ID NO: 123877 - DNA, 25 bp, Homo sapien
tggaacttcgagaggtcgtgcccgt

SEQ ID NO: 123878 - DNA, 25 bp, Homo sapien
tggaacttcgagtggtcgtgcccgt

SEQ ID NO: 123879 - DNA, 25 bp, Homo sapien
tcaaacgtcagaacggggttctatg

SEQ ID NO: 123880 - DNA, 25 bp, Homo sapien
tcaaacgtcagatcggggttctatg

SEQ ID NO: 123881 - DNA, 25 bp, Homo sapien
gtttccatctctcctgggaaaccag

SEQ ID NO: 123882 - DNA, 25 bp, Homo sapien
gtttccatctctgctgggaaaccag

SEQ ID NO: 123883 - DNA, 25 bp, Homo sapien
gtctcatccgtacttggaagtcaag

SEQ ID NO: 123884 - DNA, 25 bp, Homo sapien
gtctcatccgtagttggaagtcaag

SEQ ID NO: 123885 - DNA, 25 bp, Homo sapien
gaagtcccgcacattttactttccg

SEQ ID NO: 123886 - DNA, 25 bp, Homo sapien
gaagtcccgcactttttactttccg

SEQ ID NO: 123887 - DNA, 25 bp, Homo sapien
gagagagacaggtacctttccccga

SEQ ID NO: 123888 - DNA, 25 bp, Homo sapien
gagagagacaggaacctttccccga

SEQ ID NO: 123889 - DNA, 25 bp, Homo sapien
gagtgagatcctgtttttcccgcct

SEQ ID NO: 123890 - DNA, 25 bp, Homo sapien
gagtgagatcctctttttcccgcct

SEQ ID NO: 123891 - DNA, 25 bp, Homo sapien
ggcttaaaacctcttttcccgtgac

SEQ ID NO: 123892 - DNA, 25 bp, Homo sapien
ggcttaaaacctgttttcccgtgac

SEQ ID NO: 123893 - DNA, 25 bp, Homo sapien
ttaagaaccggattgacacctcacc

SEQ ID NO: 123894 - DNA, 25 bp, Homo sapien
ttaagaaccggaatgacacctcacc

SEQ ID NO: 123895 - DNA, 25 bp, Homo sapien
gaagggacccgaaggacccgtgctc

SEQ ID NO: 123896 - DNA, 25 bp, Homo sapien
gaagggacccgatggacccgtgctc

SEQ ID NO: 123897 - DNA, 25 bp, Homo sapien
aaaggaggtgtagtgtccttgtccg

SEQ ID NO: 123898 - DNA, 25 bp, Homo sapien
aaaggaggtgtactgtccttgtccg

SEQ ID NO: 123899 - DNA, 25 bp, Homo sapien
aacagggacgtccaggagcccggac

SEQ ID NO: 123900 - DNA, 25 bp, Homo sapien
aacagggacgtcgaggagcccggac

SEQ ID NO: 123901 - DNA, 25 bp, Homo sapien
caagggtgagtcacggacccctgct

SEQ ID NO: 123902 - DNA, 25 bp, Homo sapien
caagggtgagtctcggacccctgct

SEQ ID NO: 123903 - DNA, 25 bp, Homo sapien
actagagcgggcacaacgccttcct

SEQ ID NO: 123904 - DNA, 25 bp, Homo sapien
actagagcgggctcaacgccttcct

SEQ ID NO: 123905 - DNA, 25 bp, Homo sapien
gtatgggaccagtgcgaggtatgtt

SEQ ID NO: 123906 - DNA, 25 bp, Homo sapien
gtatgggaccagagcgaggtatgtt

SEQ ID NO: 123907 - DNA, 25 bp, Homo sapien
cagggtagagaataggctcggtctc

SEQ ID NO: 123908 - DNA, 25 bp, Homo sapien
cagggtagagaaaaggctcggtctc

SEQ ID NO: 123909 - DNA, 25 bp, Homo sapien
ccgggatagaagacgtctctgaacc

SEQ ID NO: 123910 - DNA, 25 bp, Homo sapien
ccgggatagaagtcgtctctgaacc

SEQ ID NO: 123911 - DNA, 25 bp, Homo sapien
ccggacggaagttcggtgctacgtc

SEQ ID NO: 123912 - DNA, 25 bp, Homo sapien
ccggacggaagtacggtgctacgtc

SEQ ID NO: 123913 - DNA, 25 bp, Homo sapien
cgctcctgagcgacagggattactc

SEQ ID NO: 123914 - DNA, 25 bp, Homo sapien
cgctcctgagcgtcagggattactc

SEQ ID NO: 123915 - DNA, 25 bp, Homo sapien
cggtcgcttggtcgtgtaggaaccc

SEQ ID NO: 123916 - DNA, 25 bp, Homo sapien
cggtcgcttggtggtgtaggaaccc

SEQ ID NO: 123917 - DNA, 25 bp, Homo sapien
aattatacataatggaaaacctcgg

SEQ ID NO: 123918 - DNA, 25 bp, Homo sapien
aattatacataaaggaaaacctcgg

SEQ ID NO: 123919 - DNA, 25 bp, Homo sapien
tcgatcagattatgaggaccctcct

SEQ ID NO: 123920 - DNA, 25 bp, Homo sapien
tcgatcagattaagaggaccctcct

SEQ ID NO: 123921 - DNA, 25 bp, Homo sapien
ccttagaagtggttgggacattctt

SEQ ID NO: 123922 - DNA, 25 bp, Homo sapien
ccttagaagtggatgggacattctt

SEQ ID NO: 123923 - DNA, 25 bp, Homo sapien
ctcctaaatgagtgttgaactttta

SEQ ID NO: 123924 - DNA, 25 bp, Homo sapien
ctcctaaatgagagttgaactttta

SEQ ID NO: 123925 - DNA, 25 bp, Homo sapien
cctctaaaggagacttcagggtttc

SEQ ID NO: 123926 - DNA, 25 bp, Homo sapien
cctctaaaggagtcttcagggtttc

SEQ ID NO: 123927 - DNA, 25 bp, Homo sapien
gacaaggatctctttagtggtcaat

SEQ ID NO: 123928 - DNA, 25 bp, Homo sapien
gacaaggatctcattagtggtcaat

SEQ ID NO: 123929 - DNA, 25 bp, Homo sapien
aggaggtgtcttcgtagtttcacct

SEQ ID NO: 123930 - DNA, 25 bp, Homo sapien
aggaggtgtcttggtagtttcacct

SEQ ID NO: 123931 - DNA, 25 bp, Homo sapien
ggacatagacccttccattgataac

SEQ ID NO: 123932 - DNA, 25 bp, Homo sapien
ggacatagacccatccattgataac

SEQ ID NO: 123933 - DNA, 25 bp, Homo sapien
gagttagtcgaccacaagtttatac

SEQ ID NO: 123934 - DNA, 25 bp, Homo sapien
gagttagtcgacgacaagtttatac

SEQ ID NO: 123935 - DNA, 25 bp, Homo sapien
ctgcagctgtgtttgaaagtttaac

SEQ ID NO: 123936 - DNA, 25 bp, Homo sapien
ctgcagctgtgtatgaaagtttaac

SEQ ID NO: 123937 - DNA, 25 bp, Homo sapien
tctaacgtaactcaacatcatatag

SEQ ID NO: 123938 - DNA, 25 bp, Homo sapien
tctaacgtaactgaacatcatatag

SEQ ID NO: 123939 - DNA, 25 bp, Homo sapien
gggtcggcgagcttacacaggaaat

SEQ ID NO: 123940 - DNA, 25 bp, Homo sapien
gggtcggcgagcatacacaggaaat

SEQ ID NO: 123941 - DNA, 25 bp, Homo sapien
cgagtttgtgaaactctagacccta

SEQ ID NO: 123942 - DNA, 25 bp, Homo sapien
cgagtttgtgaatctctagacccta

SEQ ID NO: 123943 - DNA, 25 bp, Homo sapien
gacagtgtggaatccggactcgcga

SEQ ID NO: 123944 - DNA, 25 bp, Homo sapien
gacagtgtggaaaccggactcgcga

SEQ ID NO: 123945 - DNA, 25 bp, Homo sapien
ttctccgacccgtttaccgtcgtag

SEQ ID NO: 123946 - DNA, 25 bp, Homo sapien
ttctccgacccgattaccgtcgtag

SEQ ID NO: 123947 - DNA, 25 bp, Homo sapien
agcagacttgaacttgttctgtctg

SEQ ID NO: 123948 - DNA, 25 bp, Homo sapien
agcagacttgaagttgttctgtctg

SEQ ID NO: 123949 - DNA, 25 bp, Homo sapien
ccagagtcgtttaatccataagttg

SEQ ID NO: 123950 - DNA, 25 bp, Homo sapien
ccagagtcgttttatccataagttg

SEQ ID NO: 123951 - DNA, 25 bp, Homo sapien
ggttctggctgtctccctttttcgt

SEQ ID NO: 123952 - DNA, 25 bp, Homo sapien
ggttctggctgtgtccctttttcgt

SEQ ID NO: 123953 - DNA, 25 bp, Homo sapien
ggttggttttcgtttccgccgtcta

SEQ ID NO: 123954 - DNA, 25 bp, Homo sapien
ggttggttttcgattccgccgtcta

SEQ ID NO: 123955 - DNA, 25 bp, Homo sapien
gacgctaacctactactacccacta

SEQ ID NO: 123956 - DNA, 25 bp, Homo sapien
gacgctaacctagtactacccacta

SEQ ID NO: 123957 - DNA, 25 bp, Homo sapien
acgcagtacctttacgactccgcta

SEQ ID NO: 123958 - DNA, 25 bp, Homo sapien
acgcagtaccttaacgactccgcta

SEQ ID NO: 123959 - DNA, 25 bp, Homo sapien
tagacgaggtcgagcagtacggtcc

SEQ ID NO: 123960 - DNA, 25 bp, Homo sapien
tagacgaggtcgtgcagtacggtcc

SEQ ID NO: 123961 - DNA, 25 bp, Homo sapien
gtcctagccgggtgtgacgacaccc

SEQ ID NO: 123962 - DNA, 25 bp, Homo sapien
gtcctagccgggagtgacgacaccc

SEQ ID NO: 123963 - DNA, 25 bp, Homo sapien
tcagtgaccgggaaggtagacccag

SEQ ID NO: 123964 - DNA, 25 bp, Homo sapien
tcagtgaccgggtaggtagacccag

SEQ ID NO: 123965 - DNA, 25 bp, Homo sapien
aatttagataaagatcttgacttaa

SEQ ID NO: 123966 - DNA, 25 bp, Homo sapien
aatttagataaacatcttgacttaa

SEQ ID NO: 123967 - DNA, 25 bp, Homo sapien
ccgggtaataaagtgattcacttca

SEQ ID NO: 123968 - DNA, 25 bp, Homo sapien
ccgggtaataaactgattcacttca

SEQ ID NO: 123969 - DNA, 25 bp, Homo sapien
ttaaaggacctgtgcgtcaagtacg

SEQ ID NO: 123970 - DNA, 25 bp, Homo sapien
ttaaaggacctgagcgtcaagtacg

SEQ ID NO: 123971 - DNA, 25 bp, Homo sapien
tacacaacataaaggtcgtcaagtt

SEQ ID NO: 123972 - DNA, 25 bp, Homo sapien
tacacaacataatggtcgtcaagtt

SEQ ID NO: 123973 - DNA, 25 bp, Homo sapien
ccctaaaaagagagtgtctgtctcg

SEQ ID NO: 123974 - DNA, 25 bp, Homo sapien
ccctaaaaagagtgtgtctgtctcg

SEQ ID NO: 123975 - DNA, 25 bp, Homo sapien
acagtggtcacaaatgcaatttcgg

SEQ ID NO: 123976 - DNA, 25 bp, Homo sapien
acagtggtcacatatgcaatttcgg

SEQ ID NO: 123977 - DNA, 25 bp, Homo sapien
aaaaccaaagttgtcttaattcgtg

SEQ ID NO: 123978 - DNA, 25 bp, Homo sapien
aaaaccaaagttctcttaattcgtg

SEQ ID NO: 123979 - DNA, 25 bp, Homo sapien
gaaggaaacataaggttcacataca

SEQ ID NO: 123980 - DNA, 25 bp, Homo sapien
gaaggaaacatatggttcacataca

SEQ ID NO: 123981 - DNA, 25 bp, Homo sapien
ttcgttggaaagtgtctttccttca

SEQ ID NO: 123982 - DNA, 25 bp, Homo sapien
ttcgttggaaagagtctttccttca

SEQ ID NO: 123983 - DNA, 25 bp, Homo sapien
ttgaactttcgtggtttcaatcacg

SEQ ID NO: 123984 - DNA, 25 bp, Homo sapien
ttgaactttcgtcgtttcaatcacg

SEQ ID NO: 123985 - DNA, 25 bp, Homo sapien
cttttacgtttgtcagccaagaacg

SEQ ID NO: 123986 - DNA, 25 bp, Homo sapien
cttttacgtttgacagccaagaacg

SEQ ID NO: 123987 - DNA, 25 bp, Homo sapien
tttatatctcacaacgataaaattc

SEQ ID NO: 123988 - DNA, 25 bp, Homo sapien
tttatatctcactacgataaaattc

SEQ ID NO: 123989 - DNA, 25 bp, Homo sapien
tcttttgtaccagaacaccacggtc

SEQ ID NO: 123990 - DNA, 25 bp, Homo sapien
tcttttgtaccacaacaccacggtc

SEQ ID NO: 123991 - DNA, 25 bp, Homo sapien
ttttttagtcttagacgtccacgaa

SEQ ID NO: 123992 - DNA, 25 bp, Homo sapien
ttttttagtctttgacgtccacgaa

SEQ ID NO: 123993 - DNA, 25 bp, Homo sapien
ggattattgacttatgactccaaac

SEQ ID NO: 123994 - DNA, 25 bp, Homo sapien
ggattattgactaatgactccaaac

SEQ ID NO: 123995 - DNA, 25 bp, Homo sapien
ctatgactctttagtaaaccgcttc

SEQ ID NO: 123996 - DNA, 25 bp, Homo sapien
ctatgactcttttgtaaaccgcttc

SEQ ID NO: 123997 - DNA, 25 bp, Homo sapien
taggtcttatagtcgagaccctcac

SEQ ID NO: 123998 - DNA, 25 bp, Homo sapien
taggtcttatagacgagaccctcac

SEQ ID NO: 123999 - DNA, 25 bp, Homo sapien
gtagacactcgagagcgaagaccca

SEQ ID NO: 124000 - DNA, 25 bp, Homo sapien
gtagacactcgacagcgaagaccca

SEQ ID NO: 124001 - DNA, 25 bp, Homo sapien
cgacgactaccagacaaagacttca

SEQ ID NO: 124002 - DNA, 25 bp, Homo sapien
cgacgactaccacacaaagacttca

SEQ ID NO: 124003 - DNA, 25 bp, Homo sapien
tcacgaaaccccttataagaattgg

SEQ ID NO: 124004 - DNA, 25 bp, Homo sapien
tcacgaaaccccatataagaattgg

SEQ ID NO: 124005 - DNA, 25 bp, Homo sapien
ggcgagaacccctttgaacagtggg

SEQ ID NO: 124006 - DNA, 25 bp, Homo sapien
ggcgagaaccccattgaacagtggg

SEQ ID NO: 124007 - DNA, 25 bp, Homo sapien
gactcgctccactcgtggacatgga

SEQ ID NO: 124008 - DNA, 25 bp, Homo sapien
gactcgctccacacgtggacatgga

SEQ ID NO: 124009 - DNA, 25 bp, Homo sapien
ctagatgaacctgaggacctgaccg

SEQ ID NO: 124010 - DNA, 25 bp, Homo sapien
ctagatgaacctcaggacctgaccg

SEQ ID NO: 124011 - DNA, 25 bp, Homo sapien
gaaccgatgaccctgggcgacatcc

SEQ ID NO: 124012 - DNA, 25 bp, Homo sapien
gaaccgatgaccgtgggcgacatcc

SEQ ID NO: 124013 - DNA, 25 bp, Homo sapien
gcccatggacgtgagttcggaatcc

SEQ ID NO: 124014 - DNA, 25 bp, Homo sapien
gcccatggacgtcagttcggaatcc

SEQ ID NO: 124015 - DNA, 25 bp, Homo sapien
ggaaattaccaagtctcgaatagaa

SEQ ID NO: 124016 - DNA, 25 bp, Homo sapien
ggaaattaccaactctcgaatagaa

SEQ ID NO: 124017 - DNA, 25 bp, Homo sapien
aagaccaggtacgacaactagtcac

SEQ ID NO: 124018 - DNA, 25 bp, Homo sapien
aagaccaggtaccacaactagtcac

SEQ ID NO: 124019 - DNA, 25 bp, Homo sapien
gtttacttgatcgtagaacatacat

SEQ ID NO: 124020 - DNA, 25 bp, Homo sapien
gtttacttgatcctagaacatacat

SEQ ID NO: 124021 - DNA, 25 bp, Homo sapien
tggacctgatgttccgcgagtcgat

SEQ ID NO: 124022 - DNA, 25 bp, Homo sapien
tggacctgatgtaccgcgagtcgat

SEQ ID NO: 124023 - DNA, 25 bp, Homo sapien
aagagcgtccgagttccgagaggat

SEQ ID NO: 124024 - DNA, 25 bp, Homo sapien
aagagcgtccgacttccgagaggat

SEQ ID NO: 124025 - DNA, 25 bp, Homo sapien
aagtctcggaggtcgtaaacgtgtg

SEQ ID NO: 124026 - DNA, 25 bp, Homo sapien
aagtctcggaggacgtaaacgtgtg

SEQ ID NO: 124027 - DNA, 25 bp, Homo sapien
actctctcgaggcctatgatacgtc

SEQ ID NO: 124028 - DNA, 25 bp, Homo sapien
actctctcgagggctatgatacgtc

SEQ ID NO: 124029 - DNA, 25 bp, Homo sapien
tggtctaccagtggatatcgtggtc

SEQ ID NO: 124030 - DNA, 25 bp, Homo sapien
tggtctaccagtcgatatcgtggtc

SEQ ID NO: 124031 - DNA, 25 bp, Homo sapien
tttagaggtacagttgtcttttcat

SEQ ID NO: 124032 - DNA, 25 bp, Homo sapien
tttagaggtacacttgtcttttcat

SEQ ID NO: 124033 - DNA, 25 bp, Homo sapien
caaaagactcgttcgacttatgtaa

SEQ ID NO: 124034 - DNA, 25 bp, Homo sapien
caaaagactcgtacgacttatgtaa

SEQ ID NO: 124035 - DNA, 25 bp, Homo sapien
gacaaccaggtcaccgtagctgtga

SEQ ID NO: 124036 - DNA, 25 bp, Homo sapien
gacaaccaggtctccgtagctgtga

SEQ ID NO: 124037 - DNA, 25 bp, Homo sapien
gtattaaccctcgttagtccatgta

SEQ ID NO: 124038 - DNA, 25 bp, Homo sapien
gtattaaccctccttagtccatgta

SEQ ID NO: 124039 - DNA, 25 bp, Homo sapien
attgtccccgacattttacttacct

SEQ ID NO: 124040 - DNA, 25 bp, Homo sapien
attgtccccgactttttacttacct

SEQ ID NO: 124041 - DNA, 25 bp, Homo sapien
agtataccagatgctatttaaccgt

SEQ ID NO: 124042 - DNA, 25 bp, Homo sapien
agtataccagatcctatttaaccgt

SEQ ID NO: 124043 - DNA, 25 bp, Homo sapien
aatataccaattcagtaacaacgac

SEQ ID NO: 124044 - DNA, 25 bp, Homo sapien
aatataccaattgagtaacaacgac

SEQ ID NO: 124045 - DNA, 25 bp, Homo sapien
gacctgtctcaagtgttcgaaaacg

SEQ ID NO: 124046 - DNA, 25 bp, Homo sapien
gacctgtctcaactgttcgaaaacg

SEQ ID NO: 124047 - DNA, 25 bp, Homo sapien
tttcacctgacgattgccgagataa

SEQ ID NO: 124048 - DNA, 25 bp, Homo sapien
tttcacctgacgtttgccgagataa

SEQ ID NO: 124049 - DNA, 25 bp, Homo sapien
gtctacactccttcgccgcggttca

SEQ ID NO: 124050 - DNA, 25 bp, Homo sapien
gtctacactcctacgccgcggttca

SEQ ID NO: 124051 - DNA, 25 bp, Homo sapien
taggtcaactagaccccgttggtct

SEQ ID NO: 124052 - DNA, 25 bp, Homo sapien
taggtcaactagtccccgttggtct

SEQ ID NO: 124053 - DNA, 25 bp, Homo sapien
gaagacccgtatgacgtttcagatt

SEQ ID NO: 124054 - DNA, 25 bp, Homo sapien
gaagacccgtatcacgtttcagatt

SEQ ID NO: 124055 - DNA, 25 bp, Homo sapien
tagaggttgccgtattaccctttga

SEQ ID NO: 124056 - DNA, 25 bp, Homo sapien
tagaggttgccgaattaccctttga

SEQ ID NO: 124057 - DNA, 25 bp, Homo sapien
aaattgtctcacactatccacttaa

SEQ ID NO: 124058 - DNA, 25 bp, Homo sapien
aaattgtctcactctatccacttaa

SEQ ID NO: 124059 - DNA, 25 bp, Homo sapien
ggtttacagtcttagttccgttgaa

SEQ ID NO: 124060 - DNA, 25 bp, Homo sapien
ggtttacagtctaagttccgttgaa

SEQ ID NO: 124061 - DNA, 25 bp, Homo sapien
gtaacggcgtagtcccgtcaacgac

SEQ ID NO: 124062 - DNA, 25 bp, Homo sapien
gtaacggcgtagacccgtcaacgac

SEQ ID NO: 124063 - DNA, 25 bp, Homo sapien
tgtaagagcatcatggtcaccgact

SEQ ID NO: 124064 - DNA, 25 bp, Homo sapien
tgtaagagcatcttggtcaccgact

SEQ ID NO: 124065 - DNA, 25 bp, Homo sapien
ttgtaagtcatctttcgtactaatg

SEQ ID NO: 124066 - DNA, 25 bp, Homo sapien
ttgtaagtcatcattcgtactaatg

SEQ ID NO: 124067 - DNA, 25 bp, Homo sapien
ttttaacagagtacactacaaatag

SEQ ID NO: 124068 - DNA, 25 bp, Homo sapien
ttttaacagagttcactacaaatag

SEQ ID NO: 124069 - DNA, 25 bp, Homo sapien
ctttacgagactctagtcttttaaa

SEQ ID NO: 124070 - DNA, 25 bp, Homo sapien
ctttacgagactgtagtcttttaaa

SEQ ID NO: 124071 - DNA, 25 bp, Homo sapien
ctatctggaattttgtaacgtgcaa

SEQ ID NO: 124072 - DNA, 25 bp, Homo sapien
ctatctggaattatgtaacgtgcaa

SEQ ID NO: 124073 - DNA, 25 bp, Homo sapien
agtcccactttggtgttcggctaga

SEQ ID NO: 124074 - DNA, 25 bp, Homo sapien
agtcccactttgctgttcggctaga

SEQ ID NO: 124075 - DNA, 25 bp, Homo sapien
agacaccactttacgggaacgtaaa

SEQ ID NO: 124076 - DNA, 25 bp, Homo sapien
agacaccacttttcgggaacgtaaa

SEQ ID NO: 124077 - DNA, 25 bp, Homo sapien
taacctaataaaggtcggtcactga

SEQ ID NO: 124078 - DNA, 25 bp, Homo sapien
taacctaataaacgtcggtcactga

SEQ ID NO: 124079 - DNA, 25 bp, Homo sapien
actcggataaaaagggctacacgac

SEQ ID NO: 124080 - DNA, 25 bp, Homo sapien
actcggataaaatgggctacacgac

SEQ ID NO: 124081 - DNA, 25 bp, Homo sapien
ggtccggtgaggacgaccaagcccc

SEQ ID NO: 124082 - DNA, 25 bp, Homo sapien
ggtccggtgaggtcgaccaagcccc

SEQ ID NO: 124083 - DNA, 25 bp, Homo sapien
agtccgggaggatccctatggataa

SEQ ID NO: 124084 - DNA, 25 bp, Homo sapien
agtccgggaggaaccctatggataa

SEQ ID NO: 124085 - DNA, 25 bp, Homo sapien
cgccccggcgagtatgcccggaaag

SEQ ID NO: 124086 - DNA, 25 bp, Homo sapien
cgccccggcgagaatgcccggaaag

SEQ ID NO: 124087 - DNA, 25 bp, Homo sapien
acgtgccgactcgaggaccgggtgt

SEQ ID NO: 124088 - DNA, 25 bp, Homo sapien
acgtgccgactccaggaccgggtgt

SEQ ID NO: 124089 - DNA, 25 bp, Homo sapien
gagggacgacgcacagcgtttggct

SEQ ID NO: 124090 - DNA, 25 bp, Homo sapien
gagggacgacgctcagcgtttggct

SEQ ID NO: 124091 - DNA, 25 bp, Homo sapien
aaggggcacgccatcttcaactcgt

SEQ ID NO: 124092 - DNA, 25 bp, Homo sapien
aaggggcacgccttcttcaactcgt

SEQ ID NO: 124093 - DNA, 25 bp, Homo sapien
agcagagtctcgtctttcttaatct

SEQ ID NO: 124094 - DNA, 25 bp, Homo sapien
agcagagtctcgactttcttaatct

SEQ ID NO: 124095 - DNA, 25 bp, Homo sapien
aaaacggtagttctgtcaccaatgt

SEQ ID NO: 124096 - DNA, 25 bp, Homo sapien
aaaacggtagttgtgtcaccaatgt

SEQ ID NO: 124097 - DNA, 25 bp, Homo sapien
actagtacttttgtagtcattctgt

SEQ ID NO: 124098 - DNA, 25 bp, Homo sapien
actagtacttttctagtcattctgt

SEQ ID NO: 124099 - DNA, 25 bp, Homo sapien
acttcgttatatatgtacagtcttg

SEQ ID NO: 124100 - DNA, 25 bp, Homo sapien
acttcgttatatttgtacagtcttg

SEQ ID NO: 124101 - DNA, 25 bp, Homo sapien
cgcgagatttcttgtcgagctctgt

SEQ ID NO: 124102 - DNA, 25 bp, Homo sapien
cgcgagatttctagtcgagctctgt

SEQ ID NO: 124103 - DNA, 25 bp, Homo sapien
ccatcccaggacagtagagctacct

SEQ ID NO: 124104 - DNA, 25 bp, Homo sapien
ccatcccaggactgtagagctacct

SEQ ID NO: 124105 - DNA, 25 bp, Homo sapien
tccttctaccggagtctggtgtcct

SEQ ID NO: 124106 - DNA, 25 bp, Homo sapien
tccttctaccggtgtctggtgtcct

SEQ ID NO: 124107 - DNA, 25 bp, Homo sapien
ctctcgttcccgtgtctcagtggtt

SEQ ID NO: 124108 - DNA, 25 bp, Homo sapien
ctctcgttcccgagtctcagtggtt

SEQ ID NO: 124109 - DNA, 25 bp, Homo sapien
gtgcaattcccctgacttccggaga

SEQ ID NO: 124110 - DNA, 25 bp, Homo sapien
gtgcaattccccagacttccggaga

SEQ ID NO: 124111 - DNA, 25 bp, Homo sapien
gtgagtacctccagagtccagcgcc

SEQ ID NO: 124112 - DNA, 25 bp, Homo sapien
gtgagtacctcctgagtccagcgcc

SEQ ID NO: 124113 - DNA, 25 bp, Homo sapien
cacgcctttgccaggtctcgggtca

SEQ ID NO: 124114 - DNA, 25 bp, Homo sapien
cacgcctttgcctggtctcgggtca

SEQ ID NO: 124115 - DNA, 25 bp, Homo sapien
gcacttccggacgtcgtcagcccag

SEQ ID NO: 124116 - DNA, 25 bp, Homo sapien
gcacttccggacctcgtcagcccag

SEQ ID NO: 124117 - DNA, 25 bp, Homo sapien
tgctcctaccgactaacagtttcgt

SEQ ID NO: 124118 - DNA, 25 bp, Homo sapien
tgctcctaccgagtaacagtttcgt

SEQ ID NO: 124119 - DNA, 25 bp, Homo sapien
aggacccacagtcctaaacagtgag

SEQ ID NO: 124120 - DNA, 25 bp, Homo sapien
aggacccacagtgctaaacagtgag

SEQ ID NO: 124121 - DNA, 25 bp, Homo sapien
aaggtccttaccaccgcagagtgcg

SEQ ID NO: 124122 - DNA, 25 bp, Homo sapien
aaggtccttacctccgcagagtgcg

SEQ ID NO: 124123 - DNA, 25 bp, Homo sapien
agacgtcttgatctcctcgacaaac

SEQ ID NO: 124124 - DNA, 25 bp, Homo sapien
agacgtcttgatgtcctcgacaaac

SEQ ID NO: 124125 - DNA, 25 bp, Homo sapien
caagttcgtctttcgcgcactgaaa

SEQ ID NO: 124126 - DNA, 25 bp, Homo sapien
caagttcgtcttacgcgcactgaaa

SEQ ID NO: 124127 - DNA, 25 bp, Homo sapien
cgacaaaattcgcgtcaaggcgaac

SEQ ID NO: 124128 - DNA, 25 bp, Homo sapien
cgacaaaattcgggtcaaggcgaac

SEQ ID NO: 124129 - DNA, 25 bp, Homo sapien
gtcagttagagaaacttcttaccca

SEQ ID NO: 124130 - DNA, 25 bp, Homo sapien
gtcagttagagatacttcttaccca

SEQ ID NO: 124131 - DNA, 25 bp, Homo sapien
actagaccgagactttgtttcctat

SEQ ID NO: 124132 - DNA, 25 bp, Homo sapien
actagaccgagagtttgtttcctat

SEQ ID NO: 124133 - DNA, 25 bp, Homo sapien
gtgcggagtctcgtagtgattcctc

SEQ ID NO: 124134 - DNA, 25 bp, Homo sapien
gtgcggagtctcctagtgattcctc

SEQ ID NO: 124135 - DNA, 25 bp, Homo sapien
cggtgtggtatctcccgagttccct

SEQ ID NO: 124136 - DNA, 25 bp, Homo sapien
cggtgtggtatcacccgagttccct

SEQ ID NO: 124137 - DNA, 25 bp, Homo sapien
ctgatgtattactcgccactttcgc

SEQ ID NO: 124138 - DNA, 25 bp, Homo sapien
ctgatgtattacacgccactttcgc

SEQ ID NO: 124139 - DNA, 25 bp, Homo sapien
gacggttgttggtctcggctgaccc

SEQ ID NO: 124140 - DNA, 25 bp, Homo sapien
gacggttgttggactcggctgaccc

SEQ ID NO: 124141 - DNA, 25 bp, Homo sapien
cacgttaggggtattgaagtccact

SEQ ID NO: 124142 - DNA, 25 bp, Homo sapien
cacgttaggggttttgaagtccact

SEQ ID NO: 124143 - DNA, 25 bp, Homo sapien
gtacgtggttcgtgatgagatccac

SEQ ID NO: 124144 - DNA, 25 bp, Homo sapien
gtacgtggttcgagatgagatccac

SEQ ID NO: 124145 - DNA, 25 bp, Homo sapien
cgtcgagtcctgagcgaagtaccag

SEQ ID NO: 124146 - DNA, 25 bp, Homo sapien
cgtcgagtcctgtgcgaagtaccag

SEQ ID NO: 124147 - DNA, 25 bp, Homo sapien
gacccaaccaaacgtacagtaaacg

SEQ ID NO: 124148 - DNA, 25 bp, Homo sapien
gacccaaccaaaggtacagtaaacg

SEQ ID NO: 124149 - DNA, 25 bp, Homo sapien
tcgaaataagagaactacgaccacg

SEQ ID NO: 124150 - DNA, 25 bp, Homo sapien
tcgaaataagagtactacgaccacg

SEQ ID NO: 124151 - DNA, 25 bp, Homo sapien
agaactgacaatcaacccggaaccg

SEQ ID NO: 124152 - DNA, 25 bp, Homo sapien
agaactgacaatgaacccggaaccg

SEQ ID NO: 124153 - DNA, 25 bp, Homo sapien
gaagagaagaagtccacaggactag

SEQ ID NO: 124154 - DNA, 25 bp, Homo sapien
gaagagaagaagaccacaggactag

SEQ ID NO: 124155 - DNA, 25 bp, Homo sapien
ttaaactaaaaagaccacactgagg

SEQ ID NO: 124156 - DNA, 25 bp, Homo sapien
ttaaactaaaaacaccacactgagg

SEQ ID NO: 124157 - DNA, 25 bp, Homo sapien
aatatacgaatgtctctcactccgg

SEQ ID NO: 124158 - DNA, 25 bp, Homo sapien
aatatacgaatgactctcactccgg

SEQ ID NO: 124159 - DNA, 25 bp, Homo sapien
cgagttgaagttctcaatgtcgtag

SEQ ID NO: 124160 - DNA, 25 bp, Homo sapien
cgagttgaagttgtcaatgtcgtag

SEQ ID NO: 124161 - DNA, 25 bp, Homo sapien
cagtttataactggttacttgagct

SEQ ID NO: 124162 - DNA, 25 bp, Homo sapien
cagtttataactcgttacttgagct

SEQ ID NO: 124163 - DNA, 25 bp, Homo sapien
aactaggtactgattttatccgtgg

SEQ ID NO: 124164 - DNA, 25 bp, Homo sapien
aactaggtactgtttttatccgtgg

SEQ ID NO: 124165 - DNA, 25 bp, Homo sapien
gaatacaacaagaacttttgtctgc

SEQ ID NO: 124166 - DNA, 25 bp, Homo sapien
gaatacaacaagtacttttgtctgc

SEQ ID NO: 124167 - DNA, 25 bp, Homo sapien
atgtgacctaatttcgttattatga

SEQ ID NO: 124168 - DNA, 25 bp, Homo sapien
atgtgacctaatatcgttattatga

SEQ ID NO: 124169 - DNA, 25 bp, Homo sapien
atgtgtcgaaaagtatctttctacc

SEQ ID NO: 124170 - DNA, 25 bp, Homo sapien
atgtgtcgaaaactatctttctacc

SEQ ID NO: 124171 - DNA, 25 bp, Homo sapien
atcggtgaaacctatagtcttgaca

SEQ ID NO: 124172 - DNA, 25 bp, Homo sapien
atcggtgaaaccaatagtcttgaca

SEQ ID NO: 124173 - DNA, 25 bp, Homo sapien
tagtaggacccttatatgtcgatat

SEQ ID NO: 124174 - DNA, 25 bp, Homo sapien
tagtaggaccctaatatgtcgatat

SEQ ID NO: 124175 - DNA, 25 bp, Homo sapien
ggaccgacctggtctagtgtagtat

SEQ ID NO: 124176 - DNA, 25 bp, Homo sapien
ggaccgacctggactagtgtagtat

SEQ ID NO: 124177 - DNA, 25 bp, Homo sapien
gtgactcacctggagacactgtaga

SEQ ID NO: 124178 - DNA, 25 bp, Homo sapien
gtgactcacctgcagacactgtaga

SEQ ID NO: 124179 - DNA, 25 bp, Homo sapien
ggttcatctacgtatacctgtacct

SEQ ID NO: 124180 - DNA, 25 bp, Homo sapien
ggttcatctacgaatacctgtacct

SEQ ID NO: 124181 - DNA, 25 bp, Homo sapien
agtgccgtcgcgacgtaccggacgc

SEQ ID NO: 124182 - DNA, 25 bp, Homo sapien
agtgccgtcgcgtcgtaccggacgc

SEQ ID NO: 124183 - DNA, 25 bp, Homo sapien
tatctacggtatcacgaagggcgac

SEQ ID NO: 124184 - DNA, 25 bp, Homo sapien
tatctacggtatgacgaagggcgac

SEQ ID NO: 124185 - DNA, 25 bp, Homo sapien
ctcggagagtcgaagtcgtgacgac

SEQ ID NO: 124186 - DNA, 25 bp, Homo sapien
ctcggagagtcgtagtcgtgacgac

SEQ ID NO: 124187 - DNA, 25 bp, Homo sapien
gtcaccccgtagtctcccgggagat

SEQ ID NO: 124188 - DNA, 25 bp, Homo sapien
gtcaccccgtagactcccgggagat

SEQ ID NO: 124189 - DNA, 25 bp, Homo sapien
ggtcccgcaagaaccgactgtggga

SEQ ID NO: 124190 - DNA, 25 bp, Homo sapien
ggtcccgcaagatccgactgtggga

SEQ ID NO: 124191 - DNA, 25 bp, Homo sapien
ccggagaccttccttcgtcttttca

SEQ ID NO: 124192 - DNA, 25 bp, Homo sapien
ccggagaccttcgttcgtcttttca

SEQ ID NO: 124193 - DNA, 25 bp, Homo sapien
gtcctagtctatgacatgtttatac

SEQ ID NO: 124194 - DNA, 25 bp, Homo sapien
gtcctagtctatcacatgtttatac

SEQ ID NO: 124195 - DNA, 25 bp, Homo sapien
tctaagtctttgttgacgtcgttcg

SEQ ID NO: 124196 - DNA, 25 bp, Homo sapien
tctaagtctttgatgacgtcgttcg

SEQ ID NO: 124197 - DNA, 25 bp, Homo sapien
acaccggactttgctacagtagtta

SEQ ID NO: 124198 - DNA, 25 bp, Homo sapien
acaccggactttcctacagtagtta

SEQ ID NO: 124199 - DNA, 25 bp, Homo sapien
tcagagtacgtcgtcgtgtaatttt

SEQ ID NO: 124200 - DNA, 25 bp, Homo sapien
tcagagtacgtcctcgtgtaatttt

SEQ ID NO: 124201 - DNA, 25 bp, Homo sapien
gtgacagaaaccatgttatttatct

SEQ ID NO: 124202 - DNA, 25 bp, Homo sapien
gtgacagaaaccttgttatttatct

SEQ ID NO: 124203 - DNA, 25 bp, Homo sapien
ggtagaccaaaagtcttctttgact

SEQ ID NO: 124204 - DNA, 25 bp, Homo sapien
ggtagaccaaaactcttctttgact

SEQ ID NO: 124205 - DNA, 25 bp, Homo sapien
gaagttcaaaattatctgttgtcct

SEQ ID NO: 124206 - DNA, 25 bp, Homo sapien
gaagttcaaaataatctgttgtcct

SEQ ID NO: 124207 - DNA, 25 bp, Homo sapien
gcacgtgaagaaataaccttttctt

SEQ ID NO: 124208 - DNA, 25 bp, Homo sapien
gcacgtgaagaattaaccttttctt

SEQ ID NO: 124209 - DNA, 25 bp, Homo sapien
gagcgatgtcttctttactattctt

SEQ ID NO: 124210 - DNA, 25 bp, Homo sapien
gagcgatgtcttgtttactattctt

SEQ ID NO: 124211 - DNA, 25 bp, Homo sapien
gacgattttatgtttaacgttactc

SEQ ID NO: 124212 - DNA, 25 bp, Homo sapien
gacgattttatgattaacgttactc

SEQ ID NO: 124213 - DNA, 25 bp, Homo sapien
acagtggtcagtattatcgttactt

SEQ ID NO: 124214 - DNA, 25 bp, Homo sapien
acagtggtcagttttatcgttactt

SEQ ID NO: 124215 - DNA, 25 bp, Homo sapien
atacagtcctcctatgtccagatgt

SEQ ID NO: 124216 - DNA, 25 bp, Homo sapien
atacagtcctccaatgtccagatgt

SEQ ID NO: 124217 - DNA, 25 bp, Homo sapien
aattgtcccgtctgttataaacgaa

SEQ ID NO: 124218 - DNA, 25 bp, Homo sapien
aattgtcccgtcagttataaacgaa

SEQ ID NO: 124219 - DNA, 25 bp, Homo sapien
taggtgtccggtatcaaccgacaga

SEQ ID NO: 124220 - DNA, 25 bp, Homo sapien
taggtgtccggtttcaaccgacaga

SEQ ID NO: 124221 - DNA, 25 bp, Homo sapien
gaacgcacggtttcggacttcctaa

SEQ ID NO: 124222 - DNA, 25 bp, Homo sapien
gaacgcacggttacggacttcctaa

SEQ ID NO: 124223 - DNA, 25 bp, Homo sapien
agagacaggactaggttccgacaca

SEQ ID NO: 124224 - DNA, 25 bp, Homo sapien
agagacaggacttggttccgacaca

SEQ ID NO: 124225 - DNA, 25 bp, Homo sapien
gtcgtgtgttcgagaccggaatagt

SEQ ID NO: 124226 - DNA, 25 bp, Homo sapien
gtcgtgtgttcgtgaccggaatagt

SEQ ID NO: 124227 - DNA, 25 bp, Homo sapien
agtggaacggggtgtccgaacacta

SEQ ID NO: 124228 - DNA, 25 bp, Homo sapien
agtggaacggggagtccgaacacta

SEQ ID NO: 124229 - DNA, 25 bp, Homo sapien
gggagccccggaagtcgcctccgta

SEQ ID NO: 124230 - DNA, 25 bp, Homo sapien
gggagccccggatgtcgcctccgta

SEQ ID NO: 124231 - DNA, 25 bp, Homo sapien
ccgcggtaagaagtcccgtcgtgtc

SEQ ID NO: 124232 - DNA, 25 bp, Homo sapien
ccgcggtaagaactcccgtcgtgtc

SEQ ID NO: 124233 - DNA, 25 bp, Homo sapien
gccacagagacttcctttcactgtc

SEQ ID NO: 124234 - DNA, 25 bp, Homo sapien
gccacagagactacctttcactgtc

SEQ ID NO: 124235 - DNA, 25 bp, Homo sapien
cacccgagagggaatttctgtgtac

SEQ ID NO: 124236 - DNA, 25 bp, Homo sapien
cacccgagagggtatttctgtgtac

SEQ ID NO: 124237 - DNA, 25 bp, Homo sapien
ggttgacctcgtcgagtgttggttc

SEQ ID NO: 124238 - DNA, 25 bp, Homo sapien
ggttgacctcgtggagtgttggttc

SEQ ID NO: 124239 - DNA, 25 bp, Homo sapien
ggtctgagtcaacaccactcgttta

SEQ ID NO: 124240 - DNA, 25 bp, Homo sapien
ggtctgagtcaagaccactcgttta

SEQ ID NO: 124241 - DNA, 25 bp, Homo sapien
gtctccgtctttgacccgtattata

SEQ ID NO: 124242 - DNA, 25 bp, Homo sapien
gtctccgtctttcacccgtattata

SEQ ID NO: 124243 - DNA, 25 bp, Homo sapien
caggtgtcacccacgctcaaagaac

SEQ ID NO: 124244 - DNA, 25 bp, Homo sapien
caggtgtcaccctcgctcaaagaac

SEQ ID NO: 124245 - DNA, 25 bp, Homo sapien
cccggccgatcttgtcgcaaggatt

SEQ ID NO: 124246 - DNA, 25 bp, Homo sapien
cccggccgatctagtcgcaaggatt

SEQ ID NO: 124247 - DNA, 25 bp, Homo sapien
tccgggtgctctcaagactagggaa

SEQ ID NO: 124248 - DNA, 25 bp, Homo sapien
tccgggtgctctgaagactagggaa

SEQ ID NO: 124249 - DNA, 25 bp, Homo sapien
gcgggaccggcgactcataaaatct

SEQ ID NO: 124250 - DNA, 25 bp, Homo sapien
gcgggaccggcgtctcataaaatct

SEQ ID NO: 124251 - DNA, 25 bp, Homo sapien
ccgggaccgggacccaacaaagtgt

SEQ ID NO: 124252 - DNA, 25 bp, Homo sapien
ccgggaccgggagccaacaaagtgt

SEQ ID NO: 124253 - DNA, 25 bp, Homo sapien
tagggaacggggaagaaccgttatc

SEQ ID NO: 124254 - DNA, 25 bp, Homo sapien
tagggaacggggtagaaccgttatc

SEQ ID NO: 124255 - DNA, 25 bp, Homo sapien
agtacgatgtctgcatgaatctttt

SEQ ID NO: 124256 - DNA, 25 bp, Homo sapien
agtacgatgtctccatgaatctttt

SEQ ID NO: 124257 - DNA, 25 bp, Homo sapien
acgtaacttctcacgtcaagaaagg

SEQ ID NO: 124258 - DNA, 25 bp, Homo sapien
acgtaacttctctcgtcaagaaagg

SEQ ID NO: 124259 - DNA, 25 bp, Homo sapien
gttttttcactcgtcacgtataaag

SEQ ID NO: 124260 - DNA, 25 bp, Homo sapien
gttttttcactcctcacgtataaag

SEQ ID NO: 124261 - DNA, 25 bp, Homo sapien
gagattccactgttctgatataatg

SEQ ID NO: 124262 - DNA, 25 bp, Homo sapien
gagattccactgatctgatataatg

SEQ ID NO: 124263 - DNA, 25 bp, Homo sapien
agaaaacaacgcttagactcggaag

SEQ ID NO: 124264 - DNA, 25 bp, Homo sapien
agaaaacaacgcatagactcggaag

SEQ ID NO: 124265 - DNA, 25 bp, Homo sapien
aagttttaaacgaatctagaccaga

SEQ ID NO: 124266 - DNA, 25 bp, Homo sapien
aagttttaaacgtatctagaccaga

SEQ ID NO: 124267 - DNA, 25 bp, Homo sapien
ccttagagaaagtcgctacctctca

SEQ ID NO: 124268 - DNA, 25 bp, Homo sapien
ccttagagaaagacgctacctctca

SEQ ID NO: 124269 - DNA, 25 bp, Homo sapien
cttttgggtgacatctcaccgtgac

SEQ ID NO: 124270 - DNA, 25 bp, Homo sapien
cttttgggtgacttctcaccgtgac

SEQ ID NO: 124271 - DNA, 25 bp, Homo sapien
ctttacgtagggaggaagtccctct

SEQ ID NO: 124272 - DNA, 25 bp, Homo sapien
ctttacgtagggtggaagtccctct

SEQ ID NO: 124273 - DNA, 25 bp, Homo sapien
tccttgtcacgatgagacctacact

SEQ ID NO: 124274 - DNA, 25 bp, Homo sapien
tccttgtcacgaagagacctacact

SEQ ID NO: 124275 - DNA, 25 bp, Homo sapien
tccaccgtagtcgaggaatcgtaga

SEQ ID NO: 124276 - DNA, 25 bp, Homo sapien
tccaccgtagtccaggaatcgtaga

SEQ ID NO: 124277 - DNA, 25 bp, Homo sapien
cacaagggttgtagttacgtgtcta

SEQ ID NO: 124278 - DNA, 25 bp, Homo sapien
cacaagggttgttgttacgtgtcta

SEQ ID NO: 124279 - DNA, 25 bp, Homo sapien
cactcaggtgtgtgcgtgtttaatc

SEQ ID NO: 124280 - DNA, 25 bp, Homo sapien
cactcaggtgtgagcgtgtttaatc

SEQ ID NO: 124281 - DNA, 25 bp, Homo sapien
tttgtgtacgcagtgactcaatacg

SEQ ID NO: 124282 - DNA, 25 bp, Homo sapien
tttgtgtacgcactgactcaatacg

SEQ ID NO: 124283 - DNA, 25 bp, Homo sapien
ggagtttgactcaggcacgtttaag

SEQ ID NO: 124284 - DNA, 25 bp, Homo sapien
ggagtttgactctggcacgtttaag

SEQ ID NO: 124285 - DNA, 25 bp, Homo sapien
gagacgttgttgtcccgactcatta

SEQ ID NO: 124286 - DNA, 25 bp, Homo sapien
gagacgttgttgacccgactcatta

SEQ ID NO: 124287 - DNA, 25 bp, Homo sapien
gtttctgtggtaccaccgacccggc

SEQ ID NO: 124288 - DNA, 25 bp, Homo sapien
gtttctgtggtagcaccgacccggc

SEQ ID NO: 124289 - DNA, 25 bp, Homo sapien
tatcacaagagaacccgaaggacac

SEQ ID NO: 124290 - DNA, 25 bp, Homo sapien
tatcacaagagatcccgaaggacac

SEQ ID NO: 124291 - DNA, 25 bp, Homo sapien
cctttacctgtcactggaagagcct

SEQ ID NO: 124292 - DNA, 25 bp, Homo sapien
cctttacctgtctctggaagagcct

SEQ ID NO: 124293 - DNA, 25 bp, Homo sapien
tacttttcaccgttcagaaggctgt

SEQ ID NO: 124294 - DNA, 25 bp, Homo sapien
tacttttcaccgatcagaaggctgt

SEQ ID NO: 124295 - DNA, 25 bp, Homo sapien
ccacttcggtacaccaaaggtctcg

SEQ ID NO: 124296 - DNA, 25 bp, Homo sapien
ccacttcggtactccaaaggtctcg

SEQ ID NO: 124297 - DNA, 25 bp, Homo sapien
cagcggtgtaaggtccaacaggtca

SEQ ID NO: 124298 - DNA, 25 bp, Homo sapien
cagcggtgtaagctccaacaggtca

SEQ ID NO: 124299 - DNA, 25 bp, Homo sapien
cctgcgaccgctcgagacacggagg

SEQ ID NO: 124300 - DNA, 25 bp, Homo sapien
cctgcgaccgctggagacacggagg

SEQ ID NO: 124301 - DNA, 25 bp, Homo sapien
ccgtctccccggtgaagaccgaggt

SEQ ID NO: 124302 - DNA, 25 bp, Homo sapien
ccgtctccccggagaagaccgaggt

SEQ ID NO: 124303 - DNA, 25 bp, Homo sapien
ggtcttgaccggacgaggaccagta

SEQ ID NO: 124304 - DNA, 25 bp, Homo sapien
ggtcttgaccggtcgaggaccagta

SEQ ID NO: 124305 - DNA, 25 bp, Homo sapien
aatgtaaacgattcacaggactaga

SEQ ID NO: 124306 - DNA, 25 bp, Homo sapien
aatgtaaacgatacacaggactaga

SEQ ID NO: 124307 - DNA, 25 bp, Homo sapien
gacgaattatactacggtacagtac

SEQ ID NO: 124308 - DNA, 25 bp, Homo sapien
gacgaattatacaacggtacagtac

SEQ ID NO: 124309 - DNA, 25 bp, Homo sapien
cgagagctgtgtaaacgaacactgt

SEQ ID NO: 124310 - DNA, 25 bp, Homo sapien
cgagagctgtgttaacgaacactgt

SEQ ID NO: 124311 - DNA, 25 bp, Homo sapien
tttcgtagccagtgccgcaagtcgt

SEQ ID NO: 124312 - DNA, 25 bp, Homo sapien
tttcgtagccagagccgcaagtcgt

SEQ ID NO: 124313 - DNA, 25 bp, Homo sapien
aggcgtgccggaagagcgggagcgt

SEQ ID NO: 124314 - DNA, 25 bp, Homo sapien
aggcgtgccggatgagcgggagcgt

SEQ ID NO: 124315 - DNA, 25 bp, Homo sapien
tgacacgcccgacagggacgtgact

SEQ ID NO: 124316 - DNA, 25 bp, Homo sapien
tgacacgcccgagagggacgtgact

SEQ ID NO: 124317 - DNA, 25 bp, Homo sapien
gtcccgaccgacgacgagagagtca

SEQ ID NO: 124318 - DNA, 25 bp, Homo sapien
gtcccgaccgaccacgagagagtca

SEQ ID NO: 124319 - DNA, 25 bp, Homo sapien
ttgagtccgactcaacggaggtcag

SEQ ID NO: 124320 - DNA, 25 bp, Homo sapien
ttgagtccgactgaacggaggtcag

SEQ ID NO: 124321 - DNA, 25 bp, Homo sapien
gtcacggaccgaaacgtgggacacg

SEQ ID NO: 124322 - DNA, 25 bp, Homo sapien
gtcacggaccgatacgtgggacacg

SEQ ID NO: 124323 - DNA, 25 bp, Homo sapien
tggacataccgtgctcgttccaccg

SEQ ID NO: 124324 - DNA, 25 bp, Homo sapien
tggacataccgtcctcgttccaccg

SEQ ID NO: 124325 - DNA, 25 bp, Homo sapien
gagggcaacccgtcgttcgagtccg

SEQ ID NO: 124326 - DNA, 25 bp, Homo sapien
gagggcaacccgacgttcgagtccg

SEQ ID NO: 124327 - DNA, 25 bp, Homo sapien
ggccagaccggcaggactgtcgact

SEQ ID NO: 124328 - DNA, 25 bp, Homo sapien
ggccagaccggctggactgtcgact

SEQ ID NO: 124329 - DNA, 25 bp, Homo sapien
tgacgtccggactttactgtagact

SEQ ID NO: 124330 - DNA, 25 bp, Homo sapien
tgacgtccggacattactgtagact

SEQ ID NO: 124331 - DNA, 25 bp, Homo sapien
acgtttaacgggagaacactacggt

SEQ ID NO: 124332 - DNA, 25 bp, Homo sapien
acgtttaacgggtgaacactacggt

SEQ ID NO: 124333 - DNA, 25 bp, Homo sapien
tgtattataagacaccgaccacccg

SEQ ID NO: 124334 - DNA, 25 bp, Homo sapien
tgtattataagagaccgaccacccg

SEQ ID NO: 124335 - DNA, 25 bp, Homo sapien
gtttcttctcggaccacaaccacgt

SEQ ID NO: 124336 - DNA, 25 bp, Homo sapien
gtttcttctcggtccacaaccacgt

SEQ ID NO: 124337 - DNA, 25 bp, Homo sapien
gttccttgaataagactctcaccgt

SEQ ID NO: 124338 - DNA, 25 bp, Homo sapien
gttccttgaatatgactctcaccgt

SEQ ID NO: 124339 - DNA, 25 bp, Homo sapien
gtaaatcacggtttacgatgtcatt

SEQ ID NO: 124340 - DNA, 25 bp, Homo sapien
gtaaatcacggtatacgatgtcatt

SEQ ID NO: 124341 - DNA, 25 bp, Homo sapien
aaatattacttgatcccattcactt

SEQ ID NO: 124342 - DNA, 25 bp, Homo sapien
aaatattacttgttcccattcactt

SEQ ID NO: 124343 - DNA, 25 bp, Homo sapien
acgggggtcttgttcccctgtcctc

SEQ ID NO: 124344 - DNA, 25 bp, Homo sapien
acgggggtcttgatcccctgtcctc

SEQ ID NO: 124345 - DNA, 25 bp, Homo sapien
gtgtgtccggttaggttccaatctc

SEQ ID NO: 124346 - DNA, 25 bp, Homo sapien
gtgtgtccggtttggttccaatctc

SEQ ID NO: 124347 - DNA, 25 bp, Homo sapien
cactggtatttgtactgtatggttc

SEQ ID NO: 124348 - DNA, 25 bp, Homo sapien
cactggtatttgaactgtatggttc

SEQ ID NO: 124349 - DNA, 25 bp, Homo sapien
cgtgactgtctgtcggttccgttac

SEQ ID NO: 124350 - DNA, 25 bp, Homo sapien
cgtgactgtctgacggttccgttac

SEQ ID NO: 124351 - DNA, 25 bp, Homo sapien
gttatctacgcagatatacgtacat

SEQ ID NO: 124352 - DNA, 25 bp, Homo sapien
gttatctacgcacatatacgtacat

SEQ ID NO: 124353 - DNA, 25 bp, Homo sapien
aagtttacgtctgtacgtatctcat

SEQ ID NO: 124354 - DNA, 25 bp, Homo sapien
aagtttacgtctctacgtatctcat

SEQ ID NO: 124355 - DNA, 25 bp, Homo sapien
taagttcgtgtgactacgtgttcac

SEQ ID NO: 124356 - DNA, 25 bp, Homo sapien
taagttcgtgtgtctacgtgttcac

SEQ ID NO: 124357 - DNA, 25 bp, Homo sapien
ttatgtcgagcaactcgcgtgagtc

SEQ ID NO: 124358 - DNA, 25 bp, Homo sapien
ttatgtcgagcatctcgcgtgagtc

SEQ ID NO: 124359 - DNA, 25 bp, Homo sapien
tggatgttgactcatcttccgacac

SEQ ID NO: 124360 - DNA, 25 bp, Homo sapien
tggatgttgactgatcttccgacac

SEQ ID NO: 124361 - DNA, 25 bp, Homo sapien
tacagagatttgatcttctgttcaa

SEQ ID NO: 124362 - DNA, 25 bp, Homo sapien
tacagagatttgttcttctgttcaa

SEQ ID NO: 124363 - DNA, 25 bp, Homo sapien
ggggtatgtaattcgttgacaacgt

SEQ ID NO: 124364 - DNA, 25 bp, Homo sapien
ggggtatgtaatacgttgacaacgt

SEQ ID NO: 124365 - DNA, 25 bp, Homo sapien
ggtggtgtcaacaaacgtccccatg

SEQ ID NO: 124366 - DNA, 25 bp, Homo sapien
ggtggtgtcaactaacgtccccatg

SEQ ID NO: 124367 - DNA, 25 bp, Homo sapien
tagtgtgtcaggaggtacccccgta

SEQ ID NO: 124368 - DNA, 25 bp, Homo sapien
tagtgtgtcaggtggtacccccgta

SEQ ID NO: 124369 - DNA, 25 bp, Homo sapien
ctaaggtcgagaaaataccacccta

SEQ ID NO: 124370 - DNA, 25 bp, Homo sapien
ctaaggtcgagataataccacccta

SEQ ID NO: 124371 - DNA, 25 bp, Homo sapien
taagaaccgtttacgaaagcgagac

SEQ ID NO: 124372 - DNA, 25 bp, Homo sapien
taagaaccgttttcgaaagcgagac

SEQ ID NO: 124373 - DNA, 25 bp, Homo sapien
gactacacctttccaagatagaacg

SEQ ID NO: 124374 - DNA, 25 bp, Homo sapien
gactacacctttgcaagatagaacg

SEQ ID NO: 124375 - DNA, 25 bp, Homo sapien
catcgatcccgtacacgaaccggtg

SEQ ID NO: 124376 - DNA, 25 bp, Homo sapien
catcgatcccgttcacgaaccggtg

SEQ ID NO: 124377 - DNA, 25 bp, Homo sapien
acttctttccggtctccatgagtgt

SEQ ID NO: 124378 - DNA, 25 bp, Homo sapien
acttctttccggactccatgagtgt

SEQ ID NO: 124379 - DNA, 25 bp, Homo sapien
tattaaatcattgtcacttcgaggt

SEQ ID NO: 124380 - DNA, 25 bp, Homo sapien
tattaaatcattctcacttcgaggt

SEQ ID NO: 124381 - DNA, 25 bp, Homo sapien
aaatcgatagtttcagtctacagag

SEQ ID NO: 124382 - DNA, 25 bp, Homo sapien
aaatcgatagttacagtctacagag

SEQ ID NO: 124383 - DNA, 25 bp, Homo sapien
aagtattcgccgtgacaggacagta

SEQ ID NO: 124384 - DNA, 25 bp, Homo sapien
aagtattcgccgagacaggacagta

SEQ ID NO: 124385 - DNA, 25 bp, Homo sapien
ccttgtctgaggagacgtaacacta

SEQ ID NO: 124386 - DNA, 25 bp, Homo sapien
ccttgtctgaggtgacgtaacacta

SEQ ID NO: 124387 - DNA, 25 bp, Homo sapien
gtttataggaacattacgactactc

SEQ ID NO: 124388 - DNA, 25 bp, Homo sapien
gtttataggaactttacgactactc

SEQ ID NO: 124389 - DNA, 25 bp, Homo sapien
gactctctcgggactatccactact

SEQ ID NO: 124390 - DNA, 25 bp, Homo sapien
gactctctcgggtctatccactact

SEQ ID NO: 124391 - DNA, 25 bp, Homo sapien
ggcaccaccgggacagtctagagtc

SEQ ID NO: 124392 - DNA, 25 bp, Homo sapien
ggcaccaccgggtcagtctagagtc

SEQ ID NO: 124393 - DNA, 25 bp, Homo sapien
cctcccagagtgtatcgacgtcggg

SEQ ID NO: 124394 - DNA, 25 bp, Homo sapien
cctcccagagtgaatcgacgtcggg

SEQ ID NO: 124395 - DNA, 25 bp, Homo sapien
ccttaaggtgggtcacgtcggcgtc

SEQ ID NO: 124396 - DNA, 25 bp, Homo sapien
ccttaaggtgggacacgtcggcgtc

SEQ ID NO: 124397 - DNA, 25 bp, Homo sapien
ctgtagacggtgtcaaagtcagttt

SEQ ID NO: 124398 - DNA, 25 bp, Homo sapien
ctgtagacggtgacaaagtcagttt

SEQ ID NO: 124399 - DNA, 25 bp, Homo sapien
cgaaccagtgcatcctatctgtacg

SEQ ID NO: 124400 - DNA, 25 bp, Homo sapien
cgaaccagtgcaacctatctgtacg

SEQ ID NO: 124401 - DNA, 25 bp, Homo sapien
tgtgactcccggtccgtcgccgtga

SEQ ID NO: 124402 - DNA, 25 bp, Homo sapien
tgtgactcccggaccgtcgccgtga

SEQ ID NO: 124403 - DNA, 25 bp, Homo sapien
tgtagacccccaaggagtccggtct

SEQ ID NO: 124404 - DNA, 25 bp, Homo sapien
tgtagacccccatggagtccggtct

SEQ ID NO: 124405 - DNA, 25 bp, Homo sapien
tggaccccgtcttcggagtctcttc

SEQ ID NO: 124406 - DNA, 25 bp, Homo sapien
tggaccccgtctacggagtctcttc

SEQ ID NO: 124407 - DNA, 25 bp, Homo sapien
tttatcaagtctgtcgagttcgaga

SEQ ID NO: 124408 - DNA, 25 bp, Homo sapien
tttatcaagtctctcgagttcgaga

SEQ ID NO: 124409 - DNA, 25 bp, Homo sapien
cctcgagagtctctcacgatgagtg

SEQ ID NO: 124410 - DNA, 25 bp, Homo sapien
cctcgagagtctgtcacgatgagtg

SEQ ID NO: 124411 - DNA, 25 bp, Homo sapien
accgtgtcattgtaccggttacgtg

SEQ ID NO: 124412 - DNA, 25 bp, Homo sapien
accgtgtcattgaaccggttacgtg

SEQ ID NO: 124413 - DNA, 25 bp, Homo sapien
aacacgtgtggtagaacctattatg

SEQ ID NO: 124414 - DNA, 25 bp, Homo sapien
aacacgtgtggttgaacctattatg

SEQ ID NO: 124415 - DNA, 25 bp, Homo sapien
atgacgtcgtggtggtccggacaac

SEQ ID NO: 124416 - DNA, 25 bp, Homo sapien
atgacgtcgtggaggtccggacaac

SEQ ID NO: 124417 - DNA, 25 bp, Homo sapien
gcagagaatcataagaacaccttta

SEQ ID NO: 124418 - DNA, 25 bp, Homo sapien
gcagagaatcattagaacaccttta

SEQ ID NO: 124419 - DNA, 25 bp, Homo sapien
tggacgattttcagaaacacctata

SEQ ID NO: 124420 - DNA, 25 bp, Homo sapien
tggacgattttctgaaacacctata

SEQ ID NO: 124421 - DNA, 25 bp, Homo sapien
cagtaagattcttttgaaccgttta

SEQ ID NO: 124422 - DNA, 25 bp, Homo sapien
cagtaagattctattgaaccgttta

SEQ ID NO: 124423 - DNA, 25 bp, Homo sapien
acaaataattctcatgctcttatga

SEQ ID NO: 124424 - DNA, 25 bp, Homo sapien
acaaataattctgatgctcttatga

SEQ ID NO: 124425 - DNA, 25 bp, Homo sapien
ttcatcaagtcagactcttaaacga

SEQ ID NO: 124426 - DNA, 25 bp, Homo sapien
ttcatcaagtcacactcttaaacga

SEQ ID NO: 124427 - DNA, 25 bp, Homo sapien
tccctcaacttattccggacgaaga

SEQ ID NO: 124428 - DNA, 25 bp, Homo sapien
tccctcaacttaatccggacgaaga

SEQ ID NO: 124429 - DNA, 25 bp, Homo sapien
ttcccagaaacgacccgtaaagaag

SEQ ID NO: 124430 - DNA, 25 bp, Homo sapien
ttcccagaaacgtcccgtaaagaag

SEQ ID NO: 124431 - DNA, 25 bp, Homo sapien
tcttgaactcggttcgctatttata

SEQ ID NO: 124432 - DNA, 25 bp, Homo sapien
tcttgaactcggatcgctatttata

SEQ ID NO: 124433 - DNA, 25 bp, Homo sapien
gagttttgactaaggtcccatttaa

SEQ ID NO: 124434 - DNA, 25 bp, Homo sapien
gagttttgactatggtcccatttaa

SEQ ID NO: 124435 - DNA, 25 bp, Homo sapien
aatttgactggatctaccatgggat

SEQ ID NO: 124436 - DNA, 25 bp, Homo sapien
aatttgactggaactaccatgggat

SEQ ID NO: 124437 - DNA, 25 bp, Homo sapien
ttattactctgacttcagagggtat

SEQ ID NO: 124438 - DNA, 25 bp, Homo sapien
ttattactctgagttcagagggtat

SEQ ID NO: 124439 - DNA, 25 bp, Homo sapien
gttcacctgtccactaatgtacgtt

SEQ ID NO: 124440 - DNA, 25 bp, Homo sapien
gttcacctgtcctctaatgtacgtt

SEQ ID NO: 124441 - DNA, 25 bp, Homo sapien
gtgtcacctggttgtctctgttgag

SEQ ID NO: 124442 - DNA, 25 bp, Homo sapien
gtgtcacctggtagtctctgttgag

SEQ ID NO: 124443 - DNA, 25 bp, Homo sapien
ttaagaacttcaaccgattgttcag

SEQ ID NO: 124444 - DNA, 25 bp, Homo sapien
ttaagaacttcatccgattgttcag

SEQ ID NO: 124445 - DNA, 25 bp, Homo sapien
agaagttcgaccacgtgtgcgagag

SEQ ID NO: 124446 - DNA, 25 bp, Homo sapien
agaagttcgacctcgtgtgcgagag

SEQ ID NO: 124447 - DNA, 25 bp, Homo sapien
tatgccgttcccatctctcaggagt

SEQ ID NO: 124448 - DNA, 25 bp, Homo sapien
tatgccgttcccttctctcaggagt

SEQ ID NO: 124449 - DNA, 25 bp, Homo sapien
tactgaatgttcacgtttttacctg

SEQ ID NO: 124450 - DNA, 25 bp, Homo sapien
tactgaatgttctcgtttttacctg

SEQ ID NO: 124451 - DNA, 25 bp, Homo sapien
ttctaaatatcttttgtgtggtcca

SEQ ID NO: 124452 - DNA, 25 bp, Homo sapien
ttctaaatatctattgtgtggtcca

SEQ ID NO: 124453 - DNA, 25 bp, Homo sapien
taaattgtctgtcgtacttagtttg

SEQ ID NO: 124454 - DNA, 25 bp, Homo sapien
taaattgtctgtggtacttagtttg

SEQ ID NO: 124455 - DNA, 25 bp, Homo sapien
ctaatcttgtcattcgtattattgg

SEQ ID NO: 124456 - DNA, 25 bp, Homo sapien
ctaatcttgtcaatcgtattattgg

SEQ ID NO: 124457 - DNA, 25 bp, Homo sapien
agtcttgtcagatccggtcctgact

SEQ ID NO: 124458 - DNA, 25 bp, Homo sapien
agtcttgtcagaaccggtcctgact

SEQ ID NO: 124459 - DNA, 25 bp, Homo sapien
gtgtcgagtttcgactcctcctcga

SEQ ID NO: 124460 - DNA, 25 bp, Homo sapien
gtgtcgagtttccactcctcctcga

SEQ ID NO: 124461 - DNA, 25 bp, Homo sapien
ggcgagagcagcaatgtcgtgtcga

SEQ ID NO: 124462 - DNA, 25 bp, Homo sapien
ggcgagagcagctatgtcgtgtcga

SEQ ID NO: 124463 - DNA, 25 bp, Homo sapien
gtctctgacctttgttagttataca

SEQ ID NO: 124464 - DNA, 25 bp, Homo sapien
gtctctgaccttagttagttataca

SEQ ID NO: 124465 - DNA, 25 bp, Homo sapien
ttgtgtcccgtaacatcgactagga

SEQ ID NO: 124466 - DNA, 25 bp, Homo sapien
ttgtgtcccgtatcatcgactagga

SEQ ID NO: 124467 - DNA, 25 bp, Homo sapien
agtacttgagggttatcgacttgac

SEQ ID NO: 124468 - DNA, 25 bp, Homo sapien
agtacttgagggatatcgacttgac

SEQ ID NO: 124469 - DNA, 25 bp, Homo sapien
gtgagtgaggcaagtgactatcgtc

SEQ ID NO: 124470 - DNA, 25 bp, Homo sapien
gtgagtgaggcatgtgactatcgtc

SEQ ID NO: 124471 - DNA, 25 bp, Homo sapien
ccccttctgtgtatgtgtgtctgag

SEQ ID NO: 124472 - DNA, 25 bp, Homo sapien
ccccttctgtgtttgtgtgtctgag

SEQ ID NO: 124473 - DNA, 25 bp, Homo sapien
cgtccgtcatagaatcgtagtctga

SEQ ID NO: 124474 - DNA, 25 bp, Homo sapien
cgtccgtcatagtatcgtagtctga

SEQ ID NO: 124475 - DNA, 25 bp, Homo sapien
cccgaagtgaaggagtgagttctgt

SEQ ID NO: 124476 - DNA, 25 bp, Homo sapien
cccgaagtgaagcagtgagttctgt

SEQ ID NO: 124477 - DNA, 25 bp, Homo sapien
aacgtaagattagaaggaccctacg

SEQ ID NO: 124478 - DNA, 25 bp, Homo sapien
aacgtaagattacaaggaccctacg

SEQ ID NO: 124479 - DNA, 25 bp, Homo sapien
gctccgtctaccttttgagattcag

SEQ ID NO: 124480 - DNA, 25 bp, Homo sapien
gctccgtctaccatttgagattcag

SEQ ID NO: 124481 - DNA, 25 bp, Homo sapien
cttttggacttagagacgtagtaca

SEQ ID NO: 124482 - DNA, 25 bp, Homo sapien
cttttggacttacagacgtagtaca

SEQ ID NO: 124483 - DNA, 25 bp, Homo sapien
tccgtctcaccacgagcggtacagt

SEQ ID NO: 124484 - DNA, 25 bp, Homo sapien
tccgtctcaccaggagcggtacagt

SEQ ID NO: 124485 - DNA, 25 bp, Homo sapien
tgtctctgtccctggagctgcgtag

SEQ ID NO: 124486 - DNA, 25 bp, Homo sapien
tgtctctgtcccaggagctgcgtag

SEQ ID NO: 124487 - DNA, 25 bp, Homo sapien
ccttcatgtcattaggacgtttgta

SEQ ID NO: 124488 - DNA, 25 bp, Homo sapien
ccttcatgtcataaggacgtttgta

SEQ ID NO: 124489 - DNA, 25 bp, Homo sapien
agcctcgtgggctagaggaccttga

SEQ ID NO: 124490 - DNA, 25 bp, Homo sapien
agcctcgtgggcaagaggaccttga

SEQ ID NO: 124491 - DNA, 25 bp, Homo sapien
tctcttaggcgatgagacccagggt

SEQ ID NO: 124492 - DNA, 25 bp, Homo sapien
tctcttaggcgaagagacccagggt

SEQ ID NO: 124493 - DNA, 25 bp, Homo sapien
ctcagtgtgccgtgcccgaatgtgt

SEQ ID NO: 124494 - DNA, 25 bp, Homo sapien
ctcagtgtgccgagcccgaatgtgt

SEQ ID NO: 124495 - DNA, 25 bp, Homo sapien
caatgctctcgaaccccgtcaagtg

SEQ ID NO: 124496 - DNA, 25 bp, Homo sapien
caatgctctcgatccccgtcaagtg

SEQ ID NO: 124497 - DNA, 25 bp, Homo sapien
aagtctctgaagcatgtcacgttgt

SEQ ID NO: 124498 - DNA, 25 bp, Homo sapien
aagtctctgaaggatgtcacgttgt

SEQ ID NO: 124499 - DNA, 25 bp, Homo sapien
aaagtacttaagacttgtgatctcg

SEQ ID NO: 124500 - DNA, 25 bp, Homo sapien
aaagtacttaagtcttgtgatctcg

SEQ ID NO: 124501 - DNA, 25 bp, Homo sapien
gccgacagtcatttcgtctggtcaa

SEQ ID NO: 124502 - DNA, 25 bp, Homo sapien
gccgacagtcatatcgtctggtcaa

SEQ ID NO: 124503 - DNA, 25 bp, Homo sapien
tcgtgtctggctgtcataggtaaga

SEQ ID NO: 124504 - DNA, 25 bp, Homo sapien
tcgtgtctggctctcataggtaaga

SEQ ID NO: 124505 - DNA, 25 bp, Homo sapien
ggtgactgactcctggagtcgaaga

SEQ ID NO: 124506 - DNA, 25 bp, Homo sapien
ggtgactgactcgtggagtcgaaga

SEQ ID NO: 124507 - DNA, 25 bp, Homo sapien
tgggactctatcaggtcgaacaaag

SEQ ID NO: 124508 - DNA, 25 bp, Homo sapien
tgggactctatctggtcgaacaaag

SEQ ID NO: 124509 - DNA, 25 bp, Homo sapien
gttcttacgtcgttaccatacaccg

SEQ ID NO: 124510 - DNA, 25 bp, Homo sapien
gttcttacgtcgataccatacaccg

SEQ ID NO: 124511 - DNA, 25 bp, Homo sapien
aatttactacgttaggtagtgcact

SEQ ID NO: 124512 - DNA, 25 bp, Homo sapien
aatttactacgtaaggtagtgcact

SEQ ID NO: 124513 - DNA, 25 bp, Homo sapien
gaacttcgtagcatagtgtcgtcca

SEQ ID NO: 124514 - DNA, 25 bp, Homo sapien
gaacttcgtagcttagtgtcgtcca

SEQ ID NO: 124515 - DNA, 25 bp, Homo sapien
gaaactcgtcgaggtccggttcttt

SEQ ID NO: 124516 - DNA, 25 bp, Homo sapien
gaaactcgtcgacgtccggttcttt

SEQ ID NO: 124517 - DNA, 25 bp, Homo sapien
gacatctctcacaggtggaacacag

SEQ ID NO: 124518 - DNA, 25 bp, Homo sapien
gacatctctcactggtggaacacag

SEQ ID NO: 124519 - DNA, 25 bp, Homo sapien
agtctcatccgtacttggaagtcaa

SEQ ID NO: 124520 - DNA, 25 bp, Homo sapien
agtctcatccgttcttggaagtcaa

SEQ ID NO: 124521 - DNA, 25 bp, Homo sapien
acttacaccctcttttgactcttcc

SEQ ID NO: 124522 - DNA, 25 bp, Homo sapien
acttacaccctcatttgactcttcc

SEQ ID NO: 124523 - DNA, 25 bp, Homo sapien
ataaaacgacggtaccgttccccca

SEQ ID NO: 124524 - DNA, 25 bp, Homo sapien
ataaaacgacggaaccgttccccca

SEQ ID NO: 124525 - DNA, 25 bp, Homo sapien
atacgaaacacagtggtttaccccc

SEQ ID NO: 124526 - DNA, 25 bp, Homo sapien
atacgaaacacactggtttaccccc

SEQ ID NO: 124527 - DNA, 25 bp, Homo sapien
gtcaaataaccattttgcccgtgac

SEQ ID NO: 124528 - DNA, 25 bp, Homo sapien
gtcaaataaccaatttgcccgtgac

SEQ ID NO: 124529 - DNA, 25 bp, Homo sapien
cttaaaacctactatgaacctcttt

SEQ ID NO: 124530 - DNA, 25 bp, Homo sapien
cttaaaacctacaatgaacctcttt

SEQ ID NO: 124531 - DNA, 25 bp, Homo sapien
ggaggagacccgaggtccttcctct

SEQ ID NO: 124532 - DNA, 25 bp, Homo sapien
ggaggagacccgtggtccttcctct

SEQ ID NO: 124533 - DNA, 25 bp, Homo sapien
gtaagagtagggttcttccctgtcc

SEQ ID NO: 124534 - DNA, 25 bp, Homo sapien
gtaagagtagggatcttccctgtcc

SEQ ID NO: 124535 - DNA, 25 bp, Homo sapien
aacaggtcgtgcttggtcgcccgga

SEQ ID NO: 124536 - DNA, 25 bp, Homo sapien
aacaggtcgtgcatggtcgcccgga

SEQ ID NO: 124537 - DNA, 25 bp, Homo sapien
taacgggtgtgcactgtcccctagc

SEQ ID NO: 124538 - DNA, 25 bp, Homo sapien
taacgggtgtgctctgtcccctagc

SEQ ID NO: 124539 - DNA, 25 bp, Homo sapien
tgtcaagggggcacagcgcctccgc

SEQ ID NO: 124540 - DNA, 25 bp, Homo sapien
tgtcaagggggctcagcgcctccgc

SEQ ID NO: 124541 - DNA, 25 bp, Homo sapien
tgagtgggaccataccgatttcggt

SEQ ID NO: 124542 - DNA, 25 bp, Homo sapien
tgagtgggaccaaaccgatttcggt

SEQ ID NO: 124543 - DNA, 25 bp, Homo sapien
aagggaacgaagtacagactcttcc

SEQ ID NO: 124544 - DNA, 25 bp, Homo sapien
aagggaacgaagaacagactcttcc

SEQ ID NO: 124545 - DNA, 25 bp, Homo sapien
aggcgaacacggactactctggccg

SEQ ID NO: 124546 - DNA, 25 bp, Homo sapien
aggcgaacacggtctactctggccg

SEQ ID NO: 124547 - DNA, 25 bp, Homo sapien
gaccgaaggagagccacgtgccgtc

SEQ ID NO: 124548 - DNA, 25 bp, Homo sapien
gaccgaaggagacccacgtgccgtc

SEQ ID NO: 124549 - DNA, 25 bp, Homo sapien
gcaccagtagcgactacaggaaccc

SEQ ID NO: 124550 - DNA, 25 bp, Homo sapien
gcaccagtagcgtctacaggaaccc

SEQ ID NO: 124551 - DNA, 25 bp, Homo sapien
tcgtcgctaggcaacgtaggaaccc

SEQ ID NO: 124552 - DNA, 25 bp, Homo sapien
tcgtcgctaggctacgtaggaaccc

SEQ ID NO: 124553 - DNA, 25 bp, Homo sapien
tttttacaaacacgagaaacccgtg

SEQ ID NO: 124554 - DNA, 25 bp, Homo sapien
tttttacaaacaggagaaacccgtg

SEQ ID NO: 124555 - DNA, 25 bp, Homo sapien
gtcgcacaattatgagaaaccacct

SEQ ID NO: 124556 - DNA, 25 bp, Homo sapien
gtcgcacaattaagagaaaccacct

SEQ ID NO: 124557 - DNA, 25 bp, Homo sapien
tcctggacctggtgggacacttcct

SEQ ID NO: 124558 - DNA, 25 bp, Homo sapien
tcctggacctggagggacacttcct

SEQ ID NO: 124559 - DNA, 25 bp, Homo sapien
ctcaaaacagtgtgggagacatttc

SEQ ID NO: 124560 - DNA, 25 bp, Homo sapien
ctcaaaacagtgagggagacatttc

SEQ ID NO: 124561 - DNA, 25 bp, Homo sapien
cgacacaaggagtgttcaggatttt

SEQ ID NO: 124562 - DNA, 25 bp, Homo sapien
cgacacaaggagagttcaggatttt

SEQ ID NO: 124563 - DNA, 25 bp, Homo sapien
cccagtgatcacttctcgggtacaa

SEQ ID NO: 124564 - DNA, 25 bp, Homo sapien
cccagtgatcacatctcgggtacaa

SEQ ID NO: 124565 - DNA, 25 bp, Homo sapien
acggatgatcttcgtgtaatctaat

SEQ ID NO: 124566 - DNA, 25 bp, Homo sapien
acggatgatcttggtgtaatctaat

SEQ ID NO: 124567 - DNA, 25 bp, Homo sapien
ggacggactccctgtgaattgaaat

SEQ ID NO: 124568 - DNA, 25 bp, Homo sapien
ggacggactcccagtgaattgaaat

SEQ ID NO: 124569 - DNA, 25 bp, Homo sapien
tggttgcgacggaaattactactat

SEQ ID NO: 124570 - DNA, 25 bp, Homo sapien
tggttgcgacggtaattactactat

SEQ ID NO: 124571 - DNA, 25 bp, Homo sapien
ccgcgcagggcgtctgaaatttacc

SEQ ID NO: 124572 - DNA, 25 bp, Homo sapien
ccgcgcagggcgactgaaatttacc

SEQ ID NO: 124573 - DNA, 25 bp, Homo sapien
tcgaacgtactaagaatactcaaga

SEQ ID NO: 124574 - DNA, 25 bp, Homo sapien
tcgaacgtactatgaatactcaaga

SEQ ID NO: 124575 - DNA, 25 bp, Homo sapien
ggactcgggagctacactctcgaaa

SEQ ID NO: 124576 - DNA, 25 bp, Homo sapien
ggactcgggagcaacactctcgaaa

SEQ ID NO: 124577 - DNA, 25 bp, Homo sapien
cagagttatggaacctgacgaccta

SEQ ID NO: 124578 - DNA, 25 bp, Homo sapien
cagagttatggatcctgacgaccta

SEQ ID NO: 124579 - DNA, 25 bp, Homo sapien
acgagtatgaagtaccgtgacttga

SEQ ID NO: 124580 - DNA, 25 bp, Homo sapien
acgagtatgaagaaccgtgacttga

SEQ ID NO: 124581 - DNA, 25 bp, Homo sapien
ttcgacaacacctgtctacttgtag

SEQ ID NO: 124582 - DNA, 25 bp, Homo sapien
ttcgacaacaccagtctacttgtag

SEQ ID NO: 124583 - DNA, 25 bp, Homo sapien
gtgcagtttcaacatgctcagtgtg

SEQ ID NO: 124584 - DNA, 25 bp, Homo sapien
gtgcagtttcaagatgctcagtgtg

SEQ ID NO: 124585 - DNA, 25 bp, Homo sapien
tgaagatttcataaccataatgtag

SEQ ID NO: 124586 - DNA, 25 bp, Homo sapien
tgaagatttcattaccataatgtag

SEQ ID NO: 124587 - DNA, 25 bp, Homo sapien
ggttaggttagtatccccgtatttg

SEQ ID NO: 124588 - DNA, 25 bp, Homo sapien
ggttaggttagtttccccgtatttg

SEQ ID NO: 124589 - DNA, 25 bp, Homo sapien
gtgttggttttcttgactgctctcc

SEQ ID NO: 124590 - DNA, 25 bp, Homo sapien
gtgttggttttcatgactgctctcc

SEQ ID NO: 124591 - DNA, 25 bp, Homo sapien
gtgggtttaccttacgctaccctta

SEQ ID NO: 124592 - DNA, 25 bp, Homo sapien
gtgggtttacctaacgctaccctta

SEQ ID NO: 124593 - DNA, 25 bp, Homo sapien
aagagtaagtccttcacgaccccta

SEQ ID NO: 124594 - DNA, 25 bp, Homo sapien
aagagtaagtccatcacgaccccta

SEQ ID NO: 124595 - DNA, 25 bp, Homo sapien
agagaggtcagtccagacgaccgag

SEQ ID NO: 124596 - DNA, 25 bp, Homo sapien
agagaggtcagtgcagacgaccgag

SEQ ID NO: 124597 - DNA, 25 bp, Homo sapien
cctaggtcaggctgtcgaggacccg

SEQ ID NO: 124598 - DNA, 25 bp, Homo sapien
cctaggtcaggcagtcgaggacccg

SEQ ID NO: 124599 - DNA, 25 bp, Homo sapien
accgggtcggagcagtcgaaaccag

SEQ ID NO: 124600 - DNA, 25 bp, Homo sapien
accgggtcggaggagtcgaaaccag

SEQ ID NO: 124601 - DNA, 25 bp, Homo sapien
attctggtaggagataccaacatga

SEQ ID NO: 124602 - DNA, 25 bp, Homo sapien
attctggtaggacataccaacatga

SEQ ID NO: 124603 - DNA, 25 bp, Homo sapien
cctgttaagaaactggattacttca

SEQ ID NO: 124604 - DNA, 25 bp, Homo sapien
cctgttaagaaagtggattacttca

SEQ ID NO: 124605 - DNA, 25 bp, Homo sapien
tctaaaggattgtaggtactcactt

SEQ ID NO: 124606 - DNA, 25 bp, Homo sapien
tctaaaggattgaaggtactcactt

SEQ ID NO: 124607 - DNA, 25 bp, Homo sapien
ttaccaaagttaatggtcgtaactt

SEQ ID NO: 124608 - DNA, 25 bp, Homo sapien
ttaccaaagttattggtcgtaactt

SEQ ID NO: 124609 - DNA, 25 bp, Homo sapien
tccgaaattagacttgtcgttactc

SEQ ID NO: 124610 - DNA, 25 bp, Homo sapien
tccgaaattagagttgtcgttactc

SEQ ID NO: 124611 - DNA, 25 bp, Homo sapien
acagtgccgaaaactgcaaattcgg

SEQ ID NO: 124612 - DNA, 25 bp, Homo sapien
acagtgccgaaatctgcaaattcgg

SEQ ID NO: 124613 - DNA, 25 bp, Homo sapien
aaagaccaaggtttccaagttcggt

SEQ ID NO: 124614 - DNA, 25 bp, Homo sapien
aaagaccaaggtatccaagttcggt

SEQ ID NO: 124615 - DNA, 25 bp, Homo sapien
caggacgagaaaaggtccagttaca

SEQ ID NO: 124616 - DNA, 25 bp, Homo sapien
caggacgagaaatggtccagttaca

SEQ ID NO: 124617 - DNA, 25 bp, Homo sapien
tgttggtagtaaaatttcccttaac

SEQ ID NO: 124618 - DNA, 25 bp, Homo sapien
tgttggtagtaatatttcccttaac

SEQ ID NO: 124619 - DNA, 25 bp, Homo sapien
attgtgctgtttggttccacatacc

SEQ ID NO: 124620 - DNA, 25 bp, Homo sapien
attgtgctgtttcgttccacatacc

SEQ ID NO: 124621 - DNA, 25 bp, Homo sapien
ttgttatgtctgtttgcacataaac

SEQ ID NO: 124622 - DNA, 25 bp, Homo sapien
ttgttatgtctgattgcacataaac

SEQ ID NO: 124623 - DNA, 25 bp, Homo sapien
tcctttcgtcataaataacatattc

SEQ ID NO: 124624 - DNA, 25 bp, Homo sapien
tcctttcgtcattaataacatattc

SEQ ID NO: 124625 - DNA, 25 bp, Homo sapien
tattttgttcagaaccacctaggtc

SEQ ID NO: 124626 - DNA, 25 bp, Homo sapien
tattttgttcagtaccacctaggtc

SEQ ID NO: 124627 - DNA, 25 bp, Homo sapien
ttttttagtctttacacacaagggt

SEQ ID NO: 124628 - DNA, 25 bp, Homo sapien
ttttttagtcttaacacacaagggt

SEQ ID NO: 124629 - DNA, 25 bp, Homo sapien
gtttgtaacttaagacccatactag

SEQ ID NO: 124630 - DNA, 25 bp, Homo sapien
gtttgtaacttatgacccatactag

SEQ ID NO: 124631 - DNA, 25 bp, Homo sapien
gaggtcatcagtggtagaccccgac

SEQ ID NO: 124632 - DNA, 25 bp, Homo sapien
gaggtcatcagtcgtagaccccgac

SEQ ID NO: 124633 - DNA, 25 bp, Homo sapien
gcaactcggcgtcgtagacgcccga

SEQ ID NO: 124634 - DNA, 25 bp, Homo sapien
gcaactcggcgtggtagacgcccga

SEQ ID NO: 124635 - DNA, 25 bp, Homo sapien
gacccgacgagcttagaacgcttca

SEQ ID NO: 124636 - DNA, 25 bp, Homo sapien
gacccgacgagcatagaacgcttca

SEQ ID NO: 124637 - DNA, 25 bp, Homo sapien
gaacacgtccactaaataacgttga

SEQ ID NO: 124638 - DNA, 25 bp, Homo sapien
gaacacgtccacaaaataacgttga

SEQ ID NO: 124639 - DNA, 25 bp, Homo sapien
ggaggaacccacatctgaagaagga

SEQ ID NO: 124640 - DNA, 25 bp, Homo sapien
ggaggaacccacttctgaagaagga

SEQ ID NO: 124641 - DNA, 25 bp, Homo sapien
ggaccggtcaactctgtgacaaggc

SEQ ID NO: 124642 - DNA, 25 bp, Homo sapien
ggaccggtcaacactgtgacaaggc

SEQ ID NO: 124643 - DNA, 25 bp, Homo sapien
ctagatgaacctgaggacctgaccg

SEQ ID NO: 124644 - DNA, 25 bp, Homo sapien
ctagatgaacctcaggacctgaccg

SEQ ID NO: 124645 - DNA, 25 bp, Homo sapien
ggaaccaaagcctgggacgaaaccg

SEQ ID NO: 124646 - DNA, 25 bp, Homo sapien
ggaaccaaagccagggacgaaaccg

SEQ ID NO: 124647 - DNA, 25 bp, Homo sapien
accatgtgacgtgacttcccatacc

SEQ ID NO: 124648 - DNA, 25 bp, Homo sapien
accatgtgacgtcacttcccatacc

SEQ ID NO: 124649 - DNA, 25 bp, Homo sapien
agatacgtcggaccttcgaatagaa

SEQ ID NO: 124650 - DNA, 25 bp, Homo sapien
agatacgtcggagcttcgaatagaa

SEQ ID NO: 124651 - DNA, 25 bp, Homo sapien
agaaggagagtagactatactgcac

SEQ ID NO: 124652 - DNA, 25 bp, Homo sapien
agaaggagagtacactatactgcac

SEQ ID NO: 124653 - DNA, 25 bp, Homo sapien
tctgtttggatcgaactaagtacat

SEQ ID NO: 124654 - DNA, 25 bp, Homo sapien
tctgtttggatccaactaagtacat

SEQ ID NO: 124655 - DNA, 25 bp, Homo sapien
gtgtgactttatagaacgacagtca

SEQ ID NO: 124656 - DNA, 25 bp, Homo sapien
gtgtgactttattgaacgacagtca

SEQ ID NO: 124657 - DNA, 25 bp, Homo sapien
gggtcgtccggctgtcctagagtga

SEQ ID NO: 124658 - DNA, 25 bp, Homo sapien
gggtcgtccggcagtcctagagtga

SEQ ID NO: 124659 - DNA, 25 bp, Homo sapien
ggttcgcacgggtcgtaaacgtgtt

SEQ ID NO: 124660 - DNA, 25 bp, Homo sapien
ggttcgcacgggacgtaaacgtgtt

SEQ ID NO: 124661 - DNA, 25 bp, Homo sapien
gttctcggaggagctaggagtactc

SEQ ID NO: 124662 - DNA, 25 bp, Homo sapien
gttctcggaggacctaggagtactc

SEQ ID NO: 124663 - DNA, 25 bp, Homo sapien
ggttcccgacgtcgagatgtgactc

SEQ ID NO: 124664 - DNA, 25 bp, Homo sapien
ggttcccgacgtggagatgtgactc

SEQ ID NO: 124665 - DNA, 25 bp, Homo sapien
agtagaggcgaggtcggtttttcat

SEQ ID NO: 124666 - DNA, 25 bp, Homo sapien
agtagaggcgagctcggtttttcat

SEQ ID NO: 124667 - DNA, 25 bp, Homo sapien
gaagaaggactttgtttatgtaagt

SEQ ID NO: 124668 - DNA, 25 bp, Homo sapien
gaagaaggacttagtttatgtaagt

SEQ ID NO: 124669 - DNA, 25 bp, Homo sapien
gtcaaaccggttatatatctgtaat

SEQ ID NO: 124670 - DNA, 25 bp, Homo sapien
gtcaaaccggttttatatctgtaat

SEQ ID NO: 124671 - DNA, 25 bp, Homo sapien
gttagaaccctttctagtcctcgaa

SEQ ID NO: 124672 - DNA, 25 bp, Homo sapien
gttagaacccttactagtcctcgaa

SEQ ID NO: 124673 - DNA, 25 bp, Homo sapien
attgtccgcggctttttctgtcggt

SEQ ID NO: 124674 - DNA, 25 bp, Homo sapien
attgtccgcggcattttctgtcggt

SEQ ID NO: 124675 - DNA, 25 bp, Homo sapien
cagttactggaagattctatacagt

SEQ ID NO: 124676 - DNA, 25 bp, Homo sapien
cagttactggaacattctatacagt

SEQ ID NO: 124677 - DNA, 25 bp, Homo sapien
aaaaacggaagttcggtaacatgac

SEQ ID NO: 124678 - DNA, 25 bp, Homo sapien
aaaaacggaagtacggtaacatgac

SEQ ID NO: 124679 - DNA, 25 bp, Homo sapien
acctgtctcaagtgttcgaaaacgt

SEQ ID NO: 124680 - DNA, 25 bp, Homo sapien
acctgtctcaagagttcgaaaacgt

SEQ ID NO: 124681 - DNA, 25 bp, Homo sapien
cgacttcacgatagacgcgacgaaa

SEQ ID NO: 124682 - DNA, 25 bp, Homo sapien
cgacttcacgattgacgcgacgaaa

SEQ ID NO: 124683 - DNA, 25 bp, Homo sapien
gccacgtcgacttgccgcgcgtgga

SEQ ID NO: 124684 - DNA, 25 bp, Homo sapien
gccacgtcgactagccgcgcgtgga

SEQ ID NO: 124685 - DNA, 25 bp, Homo sapien
aggtcacaacgtacccctcggagag

SEQ ID NO: 124686 - DNA, 25 bp, Homo sapien
aggtcacaacgttcccctcggagag

SEQ ID NO: 124687 - DNA, 25 bp, Homo sapien
gagtaacccgtagcccttgagatag

SEQ ID NO: 124688 - DNA, 25 bp, Homo sapien
gagtaacccgtaccccttgagatag

SEQ ID NO: 124689 - DNA, 25 bp, Homo sapien
agaggttgccgtattaccctttgac

SEQ ID NO: 124690 - DNA, 25 bp, Homo sapien
agaggttgccgttttaccctttgac

SEQ ID NO: 124691 - DNA, 25 bp, Homo sapien
aattttatcgacgtgtgtccattaa

SEQ ID NO: 124692 - DNA, 25 bp, Homo sapien
aattttatcgacctgtgtccattaa

SEQ ID NO: 124693 - DNA, 25 bp, Homo sapien
gtctcctacgtttgtgtccttcaat

SEQ ID NO: 124694 - DNA, 25 bp, Homo sapien
gtctcctacgttagtgtccttcaat

SEQ ID NO: 124695 - DNA, 25 bp, Homo sapien
tgccgagacgaggtcccgttaccga

SEQ ID NO: 124696 - DNA, 25 bp, Homo sapien
tgccgagacgagctcccgttaccga

SEQ ID NO: 124697 - DNA, 25 bp, Homo sapien
tgaagaacacacagcgagtcccgac

SEQ ID NO: 124698 - DNA, 25 bp, Homo sapien
tgaagaacacactgcgagtcccgac

SEQ ID NO: 124699 - DNA, 25 bp, Homo sapien
gtctgagtcacctttgtctacttac

SEQ ID NO: 124700 - DNA, 25 bp, Homo sapien
gtctgagtcaccattgtctacttac

SEQ ID NO: 124701 - DNA, 25 bp, Homo sapien
ccttaaagactttacacgtaaatag

SEQ ID NO: 124702 - DNA, 25 bp, Homo sapien
ccttaaagacttaacacgtaaatag

SEQ ID NO: 124703 - DNA, 25 bp, Homo sapien
cgtctcaatacaagtacttcttaaa

SEQ ID NO: 124704 - DNA, 25 bp, Homo sapien
cgtctcaatacatgtacttcttaaa

SEQ ID NO: 124705 - DNA, 25 bp, Homo sapien
ctgcggaagtctttagatactgaaa

SEQ ID NO: 124706 - DNA, 25 bp, Homo sapien
ctgcggaagtctatagatactgaaa

SEQ ID NO: 124707 - DNA, 25 bp, Homo sapien
cgtcgccctttttcgcgtcggtcaa

SEQ ID NO: 124708 - DNA, 25 bp, Homo sapien
cgtcgcccttttacgcgtcggtcaa

SEQ ID NO: 124709 - DNA, 25 bp, Homo sapien
ccgactgccttttgacggtatgaaa

SEQ ID NO: 124710 - DNA, 25 bp, Homo sapien
ccgactgcctttagacggtatgaaa

SEQ ID NO: 124711 - DNA, 25 bp, Homo sapien
gacccgaataaatgtcgtgccgcga

SEQ ID NO: 124712 - DNA, 25 bp, Homo sapien
gacccgaataaaagtcgtgccgcga

SEQ ID NO: 124713 - DNA, 25 bp, Homo sapien
gaccgtgataaatggggctatcggt

SEQ ID NO: 124714 - DNA, 25 bp, Homo sapien
gaccgtgataaaaggggctatcggt

SEQ ID NO: 124715 - DNA, 25 bp, Homo sapien
ttccggtaagtgacgggaaaccccg

SEQ ID NO: 124716 - DNA, 25 bp, Homo sapien
ttccggtaagtgtcgggaaaccccg

SEQ ID NO: 124717 - DNA, 25 bp, Homo sapien
tatccggcaccgtcccatggatgta

SEQ ID NO: 124718 - DNA, 25 bp, Homo sapien
tatccggcaccgacccatggatgta

SEQ ID NO: 124719 - DNA, 25 bp, Homo sapien
ccccgagacggataccccgggaagg

SEQ ID NO: 124720 - DNA, 25 bp, Homo sapien
ccccgagacggaaaccccgggaagg

SEQ ID NO: 124721 - DNA, 25 bp, Homo sapien
gtacacattgttacactcagtggaa

SEQ ID NO: 124722 - DNA, 25 bp, Homo sapien
gtacacattgtttcactcagtggaa

SEQ ID NO: 124723 - DNA, 25 bp, Homo sapien
tgcgagcacgacacagcctgaagtc

SEQ ID NO: 124724 - DNA, 25 bp, Homo sapien
tgcgagcacgactcagcctgaagtc

SEQ ID NO: 124725 - DNA, 25 bp, Homo sapien
ggagtcactaccaagtttcaagtct

SEQ ID NO: 124726 - DNA, 25 bp, Homo sapien
ggagtcactacctagtttcaagtct

SEQ ID NO: 124727 - DNA, 25 bp, Homo sapien
aagttagagccgtcttgtttaactt

SEQ ID NO: 124728 - DNA, 25 bp, Homo sapien
aagttagagccgacttgtttaactt

SEQ ID NO: 124729 - DNA, 25 bp, Homo sapien
aaagagatatgaaatcaccaactgt

SEQ ID NO: 124730 - DNA, 25 bp, Homo sapien
aaagagatatgatatcaccaactgt

SEQ ID NO: 124731 - DNA, 25 bp, Homo sapien
gatgtctatattgtgtactatattt

SEQ ID NO: 124732 - DNA, 25 bp, Homo sapien
gatgtctatattctgtactatattt

SEQ ID NO: 124733 - DNA, 25 bp, Homo sapien
cttcgtagctatttgtcagtattat

SEQ ID NO: 124734 - DNA, 25 bp, Homo sapien
cttcgtagctatatgtcagtattat

SEQ ID NO: 124735 - DNA, 25 bp, Homo sapien
cgacggttctgctgtcgacgcttag

SEQ ID NO: 124736 - DNA, 25 bp, Homo sapien
cgacggttctgcagtcgacgcttag

SEQ ID NO: 124737 - DNA, 25 bp, Homo sapien
actgcttccgacagtacggcactct

SEQ ID NO: 124738 - DNA, 25 bp, Homo sapien
actgcttccgactgtacggcactct

SEQ ID NO: 124739 - DNA, 25 bp, Homo sapien
ctcttctacgggagctcgagtgcct

SEQ ID NO: 124740 - DNA, 25 bp, Homo sapien
ctcttctacgggtgctcgagtgcct

SEQ ID NO: 124741 - DNA, 25 bp, Homo sapien
gacctgctcccgtgtcctggagtct

SEQ ID NO: 124742 - DNA, 25 bp, Homo sapien
gacctgctcccgagtcctggagtct

SEQ ID NO: 124743 - DNA, 25 bp, Homo sapien
ggttaattcccatcggttctggaac

SEQ ID NO: 124744 - DNA, 25 bp, Homo sapien
ggttaattcccaacggttctggaac

SEQ ID NO: 124745 - DNA, 25 bp, Homo sapien
gttgaagtccctaggtccatcgtcc

SEQ ID NO: 124746 - DNA, 25 bp, Homo sapien
gttgaagtcccttggtccatcgtcc

SEQ ID NO: 124747 - DNA, 25 bp, Homo sapien
aggattccgtccaggtctctggttc

SEQ ID NO: 124748 - DNA, 25 bp, Homo sapien
aggattccgtcctggtctctggttc

SEQ ID NO: 124749 - DNA, 25 bp, Homo sapien
ctcagttccgccgcgcagaccccgt

SEQ ID NO: 124750 - DNA, 25 bp, Homo sapien
ctcagttccgccccgcagaccccgt

SEQ ID NO: 124751 - DNA, 25 bp, Homo sapien
tcccggtctcgacgtaagatgttct

SEQ ID NO: 124752 - DNA, 25 bp, Homo sapien
tcccggtctcgaggtaagatgttct

SEQ ID NO: 124753 - DNA, 25 bp, Homo sapien
acaccgtactgtctaaatatgtcgt

SEQ ID NO: 124754 - DNA, 25 bp, Homo sapien
acaccgtactgtgtaaatatgtcgt

SEQ ID NO: 124755 - DNA, 25 bp, Homo sapien
gtaccttcgctaagccgagtaggcg

SEQ ID NO: 124756 - DNA, 25 bp, Homo sapien
gtaccttcgctatgccgagtaggcg

SEQ ID NO: 124757 - DNA, 25 bp, Homo sapien
gacgtctggacttagtcccaaagac

SEQ ID NO: 124758 - DNA, 25 bp, Homo sapien
gacgtctggactaagtcccaaagac

SEQ ID NO: 124759 - DNA, 25 bp, Homo sapien
cagtaggtgccttggcctagataga

SEQ ID NO: 124760 - DNA, 25 bp, Homo sapien
cagtaggtgcctaggcctagataga

SEQ ID NO: 124761 - DNA, 25 bp, Homo sapien
aaaagtaggcctacaggaacgacga

SEQ ID NO: 124762 - DNA, 25 bp, Homo sapien
aaaagtaggccttcaggaacgacga

SEQ ID NO: 124763 - DNA, 25 bp, Homo sapien
gacagaacgataaacttttaccgaa

SEQ ID NO: 124764 - DNA, 25 bp, Homo sapien
gacagaacgatatacttttaccgaa

SEQ ID NO: 124765 - DNA, 25 bp, Homo sapien
tgacaaacgaagttcgtttttcctt

SEQ ID NO: 124766 - DNA, 25 bp, Homo sapien
tgacaaacgaagatcgtttttcctt

SEQ ID NO: 124767 - DNA, 25 bp, Homo sapien
agcagagactactgttcattcctat

SEQ ID NO: 124768 - DNA, 25 bp, Homo sapien
agcagagactacagttcattcctat

SEQ ID NO: 124769 - DNA, 25 bp, Homo sapien
aggtgggttacgtcccggttccact

SEQ ID NO: 124770 - DNA, 25 bp, Homo sapien
aggtgggttacgacccggttccact

SEQ ID NO: 124771 - DNA, 25 bp, Homo sapien
acggatgtgtgatcaccgcatttcc

SEQ ID NO: 124772 - DNA, 25 bp, Homo sapien
acggatgtgtgaacaccgcatttcc

SEQ ID NO: 124773 - DNA, 25 bp, Homo sapien
acgctatgggagtcgacggatgccc

SEQ ID NO: 124774 - DNA, 25 bp, Homo sapien
acgctatgggagacgacggatgccc

SEQ ID NO: 124775 - DNA, 25 bp, Homo sapien
gcacgttaggggtattgaagtccac

SEQ ID NO: 124776 - DNA, 25 bp, Homo sapien
gcacgttaggggaattgaagtccac

SEQ ID NO: 124777 - DNA, 25 bp, Homo sapien
gtgtgtgtgtgcatttgtagtccac

SEQ ID NO: 124778 - DNA, 25 bp, Homo sapien
gtgtgtgtgtgcttttgtagtccac

SEQ ID NO: 124779 - DNA, 25 bp, Homo sapien
ggctcggtgggaagtcatagaccac

SEQ ID NO: 124780 - DNA, 25 bp, Homo sapien
ggctcggtgggatgtcatagaccac

SEQ ID NO: 124781 - DNA, 25 bp, Homo sapien
ctcagccggaagcacatacgcgacg

SEQ ID NO: 124782 - DNA, 25 bp, Homo sapien
ctcagccggaaggacatacgcgacg

SEQ ID NO: 124783 - DNA, 25 bp, Homo sapien
cgtcaaagaaagagactacacgtac

SEQ ID NO: 124784 - DNA, 25 bp, Homo sapien
cgtcaaagaaagtgactacacgtac

SEQ ID NO: 124785 - DNA, 25 bp, Homo sapien
aagaactgacaatcaacccggaacc

SEQ ID NO: 124786 - DNA, 25 bp, Homo sapien
aagaactgacaaacaacccggaacc

SEQ ID NO: 124787 - DNA, 25 bp, Homo sapien
gaacggaaaccgtccggaggaccgt

SEQ ID NO: 124788 - DNA, 25 bp, Homo sapien
gaacggaaaccgaccggaggaccgt

SEQ ID NO: 124789 - DNA, 25 bp, Homo sapien
aaaactgaatattcccgaactgagg

SEQ ID NO: 124790 - DNA, 25 bp, Homo sapien
aaaactgaatatacccgaactgagg

SEQ ID NO: 124791 - DNA, 25 bp, Homo sapien
atattcaatgaacgtcacttacgtg

SEQ ID NO: 124792 - DNA, 25 bp, Homo sapien
atattcaatgaaggtcacttacgtg

SEQ ID NO: 124793 - DNA, 25 bp, Homo sapien
tctattgaagtttctcgaaccgcag

SEQ ID NO: 124794 - DNA, 25 bp, Homo sapien
tctattgaagttactcgaaccgcag

SEQ ID NO: 124795 - DNA, 25 bp, Homo sapien
aagtttactaatggtcacattgtct

SEQ ID NO: 124796 - DNA, 25 bp, Homo sapien
aagtttactaatcgtcacattgtct

SEQ ID NO: 124797 - DNA, 25 bp, Homo sapien
gtagtagtggttattttactcctgc

SEQ ID NO: 124798 - DNA, 25 bp, Homo sapien
gtagtagtggtttttttactcctgc

SEQ ID NO: 124799 - DNA, 25 bp, Homo sapien
ttacgaacatagtacttctttctgg

SEQ ID NO: 124800 - DNA, 25 bp, Homo sapien
ttacgaacatagaacttctttctgg

SEQ ID NO: 124801 - DNA, 25 bp, Homo sapien
atgacaccataaactgtttgttcga

SEQ ID NO: 124802 - DNA, 25 bp, Homo sapien
atgacaccataatctgtttgttcga

SEQ ID NO: 124803 - DNA, 25 bp, Homo sapien
atgacgtttaaatagtcgtttctcc

SEQ ID NO: 124804 - DNA, 25 bp, Homo sapien
atgacgtttaaaaagtcgtttctcc

SEQ ID NO: 124805 - DNA, 25 bp, Homo sapien
gatcagtcaaatcaagttcgtttaa

SEQ ID NO: 124806 - DNA, 25 bp, Homo sapien
gatcagtcaaatgaagttcgtttaa

SEQ ID NO: 124807 - DNA, 25 bp, Homo sapien
attgaactcctatgtcgtgtcggta

SEQ ID NO: 124808 - DNA, 25 bp, Homo sapien
attgaactcctaagtcgtgtcggta

SEQ ID NO: 124809 - DNA, 25 bp, Homo sapien
gggaccgacctggtctagtgtagta

SEQ ID NO: 124810 - DNA, 25 bp, Homo sapien
gggaccgacctgctctagtgtagta

SEQ ID NO: 124811 - DNA, 25 bp, Homo sapien
ccgggtcacctgtcgacacgtgaga

SEQ ID NO: 124812 - DNA, 25 bp, Homo sapien
ccgggtcacctgacgacacgtgaga

SEQ ID NO: 124813 - DNA, 25 bp, Homo sapien
aggtactcatgtgatacacctgaat

SEQ ID NO: 124814 - DNA, 25 bp, Homo sapien
aggtactcatgtcatacacctgaat

SEQ ID NO: 124815 - DNA, 25 bp, Homo sapien
ttggtcgctgcgtcgtacctgacct

SEQ ID NO: 124816 - DNA, 25 bp, Homo sapien
ttggtcgctgcgacgtacctgacct

SEQ ID NO: 124817 - DNA, 25 bp, Homo sapien
ttcctaaacgcgttgaacagggcgc

SEQ ID NO: 124818 - DNA, 25 bp, Homo sapien
ttcctaaacgcgatgaacagggcgc

SEQ ID NO: 124819 - DNA, 25 bp, Homo sapien
ccggagacagtaagacgtcgacgtc

SEQ ID NO: 124820 - DNA, 25 bp, Homo sapien
ccggagacagtatgacgtcgacgtc

SEQ ID NO: 124821 - DNA, 25 bp, Homo sapien
gtcccccgagaggcgtccggtgaca

SEQ ID NO: 124822 - DNA, 25 bp, Homo sapien
gtcccccgagagccgtccggtgaca

SEQ ID NO: 124823 - DNA, 25 bp, Homo sapien
gtcctccaggaagacggttcgtcga

SEQ ID NO: 124824 - DNA, 25 bp, Homo sapien
gtcctccaggaacacggttcgtcga

SEQ ID NO: 124825 - DNA, 25 bp, Homo sapien
gcgagactctggagcgtccttctca

SEQ ID NO: 124826 - DNA, 25 bp, Homo sapien
gcgagactctggtgcgtccttctca

SEQ ID NO: 124827 - DNA, 25 bp, Homo sapien
agtcctagtctatgacatgtttata

SEQ ID NO: 124828 - DNA, 25 bp, Homo sapien
agtcctagtctaagacatgtttata

SEQ ID NO: 124829 - DNA, 25 bp, Homo sapien
tctacagtctgaggaagacgtctgc

SEQ ID NO: 124830 - DNA, 25 bp, Homo sapien
tctacagtctgacgaagacgtctgc

SEQ ID NO: 124831 - DNA, 25 bp, Homo sapien
ctgaggacgtttgcaagtatgtact

SEQ ID NO: 124832 - DNA, 25 bp, Homo sapien
ctgaggacgtttccaagtatgtact

SEQ ID NO: 124833 - DNA, 25 bp, Homo sapien
cctggagacgtttctgatatatgta

SEQ ID NO: 124834 - DNA, 25 bp, Homo sapien
cctggagacgttactgatatatgta

SEQ ID NO: 124835 - DNA, 25 bp, Homo sapien
gtgacagaaactcagtttttacttc

SEQ ID NO: 124836 - DNA, 25 bp, Homo sapien
gtgacagaaactgagtttttacttc

SEQ ID NO: 124837 - DNA, 25 bp, Homo sapien
gtcggaccaaatatcttctgtattt

SEQ ID NO: 124838 - DNA, 25 bp, Homo sapien
gtcggaccaaatttcttctgtattt

SEQ ID NO: 124839 - DNA, 25 bp, Homo sapien
gtctgtatcaatgtttctcgtttcc

SEQ ID NO: 124840 - DNA, 25 bp, Homo sapien
gtctgtatcaatctttctcgtttcc

SEQ ID NO: 124841 - DNA, 25 bp, Homo sapien
gtctagtaaaaatttacctgtttaa

SEQ ID NO: 124842 - DNA, 25 bp, Homo sapien
gtctagtaaaaaattacctgtttaa

SEQ ID NO: 124843 - DNA, 25 bp, Homo sapien
cgagagatgactacttcaatatttt

SEQ ID NO: 124844 - DNA, 25 bp, Homo sapien
cgagagatgacttcttcaatatttt

SEQ ID NO: 124845 - DNA, 25 bp, Homo sapien
cggaggttttgtgacttaatctctc

SEQ ID NO: 124846 - DNA, 25 bp, Homo sapien
cggaggttttgtcacttaatctctc

SEQ ID NO: 124847 - DNA, 25 bp, Homo sapien
acggtggtccgctgttatgatactt

SEQ ID NO: 124848 - DNA, 25 bp, Homo sapien
acggtggtccgcagttatgatactt

SEQ ID NO: 124849 - DNA, 25 bp, Homo sapien
aaccgaccgtcctattccgaatacg

SEQ ID NO: 124850 - DNA, 25 bp, Homo sapien
aaccgaccgtccaattccgaatacg

SEQ ID NO: 124851 - DNA, 25 bp, Homo sapien
aagtgtgaccccaactgaacagaac

SEQ ID NO: 124852 - DNA, 25 bp, Homo sapien
aagtgtgacccctactgaacagaac

SEQ ID NO: 124853 - DNA, 25 bp, Homo sapien
tagtaggtccatattagacacgaaa

SEQ ID NO: 124854 - DNA, 25 bp, Homo sapien
tagtaggtccattttagacacgaaa

SEQ ID NO: 124855 - DNA, 25 bp, Homo sapien
gaaccgaccgagtccattcgacaac

SEQ ID NO: 124856 - DNA, 25 bp, Homo sapien
gaaccgaccgagaccattcgacaac

SEQ ID NO: 124857 - DNA, 25 bp, Homo sapien
cgagaacggaggagtgattcgacaa

SEQ ID NO: 124858 - DNA, 25 bp, Homo sapien
cgagaacggaggtgtgattcgacaa

SEQ ID NO: 124859 - DNA, 25 bp, Homo sapien
ggtcgaggttctaaaccgtacgaaa

SEQ ID NO: 124860 - DNA, 25 bp, Homo sapien
ggtcgaggttcttaaccgtacgaaa

SEQ ID NO: 124861 - DNA, 25 bp, Homo sapien
gtaggagggccgtgtacctacacaa

SEQ ID NO: 124862 - DNA, 25 bp, Homo sapien
gtaggagggccgagtacctacacaa

SEQ ID NO: 124863 - DNA, 25 bp, Homo sapien
gagagaccccggactgacaccctat

SEQ ID NO: 124864 - DNA, 25 bp, Homo sapien
gagagaccccggtctgacaccctat

SEQ ID NO: 124865 - DNA, 25 bp, Homo sapien
gcaacgacggaggaatctccccttc

SEQ ID NO: 124866 - DNA, 25 bp, Homo sapien
gcaacgacggagcaatctccccttc

SEQ ID NO: 124867 - DNA, 25 bp, Homo sapien
ccggggactctatctgtaccctgtc

SEQ ID NO: 124868 - DNA, 25 bp, Homo sapien
ccggggactctaactgtaccctgtc

SEQ ID NO: 124869 - DNA, 25 bp, Homo sapien
cgacccagggcgacggtttgtgtac

SEQ ID NO: 124870 - DNA, 25 bp, Homo sapien
cgacccagggcgtcggtttgtgtac

SEQ ID NO: 124871 - DNA, 25 bp, Homo sapien
ggttgaatcggtacggttcggttct

SEQ ID NO: 124872 - DNA, 25 bp, Homo sapien
ggttgaatcggttcggttcggttct

SEQ ID NO: 124873 - DNA, 25 bp, Homo sapien
agtctgagtaaacatgacggtttac

SEQ ID NO: 124874 - DNA, 25 bp, Homo sapien
agtctgagtaaagatgacggtttac

SEQ ID NO: 124875 - DNA, 25 bp, Homo sapien
gtacttcgtcttgtaaacttttagt

SEQ ID NO: 124876 - DNA, 25 bp, Homo sapien
gtacttcgtcttctaaacttttagt

SEQ ID NO: 124877 - DNA, 25 bp, Homo sapien
gtttacgactctacctgaaagaact

SEQ ID NO: 124878 - DNA, 25 bp, Homo sapien
gtttacgactcttcctgaaagaact

SEQ ID NO: 124879 - DNA, 25 bp, Homo sapien
cgacgccactgtcgtccgaagagaa

SEQ ID NO: 124880 - DNA, 25 bp, Homo sapien
cgacgccactgtggtccgaagagaa

SEQ ID NO: 124881 - DNA, 25 bp, Homo sapien
accgggtccctgtaggaggagtata

SEQ ID NO: 124882 - DNA, 25 bp, Homo sapien
accgggtccctgaaggaggagtata

SEQ ID NO: 124883 - DNA, 25 bp, Homo sapien
cgcgggaccctcgaaataaacttac

SEQ ID NO: 124884 - DNA, 25 bp, Homo sapien
cgcgggaccctccaaataaacttac

SEQ ID NO: 124885 - DNA, 25 bp, Homo sapien
cacgggcacgggtccaacatctagg

SEQ ID NO: 124886 - DNA, 25 bp, Homo sapien
cacgggcacgggaccaacatctagg

SEQ ID NO: 124887 - DNA, 25 bp, Homo sapien
gaggacgagggtctaaacctcagtc

SEQ ID NO: 124888 - DNA, 25 bp, Homo sapien
gaggacgagggtgtaaacctcagtc

SEQ ID NO: 124889 - DNA, 25 bp, Homo sapien
ggacgacccttcatgaactctcatc

SEQ ID NO: 124890 - DNA, 25 bp, Homo sapien
ggacgacccttcttgaactctcatc

SEQ ID NO: 124891 - DNA, 25 bp, Homo sapien
gacgaatctctatccacaaataagg

SEQ ID NO: 124892 - DNA, 25 bp, Homo sapien
gacgaatctctaaccacaaataagg

SEQ ID NO: 124893 - DNA, 25 bp, Homo sapien
ggtaattgtttaacccacagtaaag

SEQ ID NO: 124894 - DNA, 25 bp, Homo sapien
ggtaattgtttatcccacagtaaag

SEQ ID NO: 124895 - DNA, 25 bp, Homo sapien
gtagattccaataccacgagaactg

SEQ ID NO: 124896 - DNA, 25 bp, Homo sapien
gtagattccaattccacgagaactg

SEQ ID NO: 124897 - DNA, 25 bp, Homo sapien
tagaaaacaacacatactgataggt

SEQ ID NO: 124898 - DNA, 25 bp, Homo sapien
tagaaaacaacagatactgataggt

SEQ ID NO: 124899 - DNA, 25 bp, Homo sapien
cagttttaaaagttactaccttagg

SEQ ID NO: 124900 - DNA, 25 bp, Homo sapien
cagttttaaaagatactaccttagg

SEQ ID NO: 124901 - DNA, 25 bp, Homo sapien
acattaacaaggtcgctaccttagg

SEQ ID NO: 124902 - DNA, 25 bp, Homo sapien
acattaacaaggacgctaccttagg

SEQ ID NO: 124903 - DNA, 25 bp, Homo sapien
caattgatagtgaatccactgtaga

SEQ ID NO: 124904 - DNA, 25 bp, Homo sapien
caattgatagtgtatccactgtaga

SEQ ID NO: 124905 - DNA, 25 bp, Homo sapien
ctgttactggtaagtgaaatccctt

SEQ ID NO: 124906 - DNA, 25 bp, Homo sapien
ctgttactggtatgtgaaatccctt

SEQ ID NO: 124907 - DNA, 25 bp, Homo sapien
tgtctattgtagtgagacctactat

SEQ ID NO: 124908 - DNA, 25 bp, Homo sapien
tgtctattgtagagagacctactat

SEQ ID NO: 124909 - DNA, 25 bp, Homo sapien
tctctcacgtgctgggacccgtaga

SEQ ID NO: 124910 - DNA, 25 bp, Homo sapien
tctctcacgtgcagggacccgtaga

SEQ ID NO: 124911 - DNA, 25 bp, Homo sapien
tcacaagaggtaaggtttcggtcga

SEQ ID NO: 124912 - DNA, 25 bp, Homo sapien
tcacaagaggtatggtttcggtcga

SEQ ID NO: 124913 - DNA, 25 bp, Homo sapien
acacactgggtgtgtcgttttaaat

SEQ ID NO: 124914 - DNA, 25 bp, Homo sapien
acacactgggtgagtcgttttaaat

SEQ ID NO: 124915 - DNA, 25 bp, Homo sapien
catttggtgacacgaactaaagtag

SEQ ID NO: 124916 - DNA, 25 bp, Homo sapien
catttggtgacaggaactaaagtag

SEQ ID NO: 124917 - DNA, 25 bp, Homo sapien
aaagacttgcacaggcacgagataa

SEQ ID NO: 124918 - DNA, 25 bp, Homo sapien
aaagacttgcactggcacgagataa

SEQ ID NO: 124919 - DNA, 25 bp, Homo sapien
aacgttttgaccttcgacgaataag

SEQ ID NO: 124920 - DNA, 25 bp, Homo sapien
aacgttttgaccatcgacgaataag

SEQ ID NO: 124921 - DNA, 25 bp, Homo sapien
aggttttgggaccaccaacaccgcg

SEQ ID NO: 124922 - DNA, 25 bp, Homo sapien
aggttttgggacgaccaacaccgcg

SEQ ID NO: 124923 - DNA, 25 bp, Homo sapien
tatcaatgagactccaactgtcgac

SEQ ID NO: 124924 - DNA, 25 bp, Homo sapien
tatcaatgagacaccaactgtcgac

SEQ ID NO: 124925 - DNA, 25 bp, Homo sapien
ccattgatgtccagtaaaaggccgt

SEQ ID NO: 124926 - DNA, 25 bp, Homo sapien
ccattgatgtcctgtaaaaggccgt

SEQ ID NO: 124927 - DNA, 25 bp, Homo sapien
gattttgtctcatcaaagagtctat

SEQ ID NO: 124928 - DNA, 25 bp, Homo sapien
gattttgtctcaacaaagagtctat

SEQ ID NO: 124929 - DNA, 25 bp, Homo sapien
cacgggtggtacactctaaaggtcc

SEQ ID NO: 124930 - DNA, 25 bp, Homo sapien
cacgggtggtactctctaaaggtcc

SEQ ID NO: 124931 - DNA, 25 bp, Homo sapien
agccggggtaattcgcaagggtcac

SEQ ID NO: 124932 - DNA, 25 bp, Homo sapien
agccggggtaatacgcaagggtcac

SEQ ID NO: 124933 - DNA, 25 bp, Homo sapien
cccctggaactccagacaacggagg

SEQ ID NO: 124934 - DNA, 25 bp, Homo sapien
cccctggaactcgagacaacggagg

SEQ ID NO: 124935 - DNA, 25 bp, Homo sapien
tctctctcccgtccttaaacggggt

SEQ ID NO: 124936 - DNA, 25 bp, Homo sapien
tctctctcccgtgcttaaacggggt

SEQ ID NO: 124937 - DNA, 25 bp, Homo sapien
ttcctctgccgtttcaggaccagta

SEQ ID NO: 124938 - DNA, 25 bp, Homo sapien
ttcctctgccgtatcaggaccagta

SEQ ID NO: 124939 - DNA, 25 bp, Homo sapien
gcttaacacgttttagagacctata

SEQ ID NO: 124940 - DNA, 25 bp, Homo sapien
gcttaacacgttatagagacctata

SEQ ID NO: 124941 - DNA, 25 bp, Homo sapien
acgaattatactacggtacagtact

SEQ ID NO: 124942 - DNA, 25 bp, Homo sapien
acgaattatacttcggtacagtact

SEQ ID NO: 124943 - DNA, 25 bp, Homo sapien
ccgacagtgttattacgacactatt

SEQ ID NO: 124944 - DNA, 25 bp, Homo sapien
ccgacagtgttaatacgacactatt

SEQ ID NO: 124945 - DNA, 25 bp, Homo sapien
gtttcgtagccagtgccgcaagtcg

SEQ ID NO: 124946 - DNA, 25 bp, Homo sapien
gtttcgtagccactgccgcaagtcg

SEQ ID NO: 124947 - DNA, 25 bp, Homo sapien
agccgtgaccccgacgacgcgaagg

SEQ ID NO: 124948 - DNA, 25 bp, Homo sapien
agccgtgacccccacgacgcgaagg

SEQ ID NO: 124949 - DNA, 25 bp, Homo sapien
gacgtgtcccgacgacaggagtcac

SEQ ID NO: 124950 - DNA, 25 bp, Homo sapien
gacgtgtcccgaggacaggagtcac

SEQ ID NO: 124951 - DNA, 25 bp, Homo sapien
gtcgtctcccacgaccgaggtgact

SEQ ID NO: 124952 - DNA, 25 bp, Homo sapien
gtcgtctcccaccaccgaggtgact

SEQ ID NO: 124953 - DNA, 25 bp, Homo sapien
tcgatccgtacctctgaagtcgagt

SEQ ID NO: 124954 - DNA, 25 bp, Homo sapien
tcgatccgtaccactgaagtcgagt

SEQ ID NO: 124955 - DNA, 25 bp, Homo sapien
cgaggacacgtacgactggtgcagt

SEQ ID NO: 124956 - DNA, 25 bp, Homo sapien
cgaggacacgtaggactggtgcagt

SEQ ID NO: 124957 - DNA, 25 bp, Homo sapien
ggacagtccgtcgactactcccgag

SEQ ID NO: 124958 - DNA, 25 bp, Homo sapien
ggacagtccgtccactactcccgag

SEQ ID NO: 124959 - DNA, 25 bp, Homo sapien
agcaggaacccgacgactcgatccg

SEQ ID NO: 124960 - DNA, 25 bp, Homo sapien
agcaggaacccgtcgactcgatccg

SEQ ID NO: 124961 - DNA, 25 bp, Homo sapien
caggtccaaccctagcgacagtcga

SEQ ID NO: 124962 - DNA, 25 bp, Homo sapien
caggtccaacccaagcgacagtcga

SEQ ID NO: 124963 - DNA, 25 bp, Homo sapien
cgttccgccggagtgtctgtgacgt

SEQ ID NO: 124964 - DNA, 25 bp, Homo sapien
cgttccgccggactgtctgtgacgt

SEQ ID NO: 124965 - DNA, 25 bp, Homo sapien
cgtttacggaggtcgagacatcagt

SEQ ID NO: 124966 - DNA, 25 bp, Homo sapien
cgtttacggaggacgagacatcagt

SEQ ID NO: 124967 - DNA, 25 bp, Homo sapien
ctggtcttaggtggaccgaacatcc

SEQ ID NO: 124968 - DNA, 25 bp, Homo sapien
ctggtcttaggtcgaccgaacatcc

SEQ ID NO: 124969 - DNA, 25 bp, Homo sapien
tctttcttcggggacaagagaccct

SEQ ID NO: 124970 - DNA, 25 bp, Homo sapien
tctttcttcgggcacaagagaccct

SEQ ID NO: 124971 - DNA, 25 bp, Homo sapien
cgttccttgaataagactctcaccg

SEQ ID NO: 124972 - DNA, 25 bp, Homo sapien
cgttccttgaattagactctcaccg

SEQ ID NO: 124973 - DNA, 25 bp, Homo sapien
ttatagtgacggtttaactgtcatc

SEQ ID NO: 124974 - DNA, 25 bp, Homo sapien
ttatagtgacggattaactgtcatc

SEQ ID NO: 124975 - DNA, 25 bp, Homo sapien
gaaatgtttcgtgaccacattcaca

SEQ ID NO: 124976 - DNA, 25 bp, Homo sapien
gaaatgtttcgtcaccacattcaca

SEQ ID NO: 124977 - DNA, 25 bp, Homo sapien
gaaatgtctctgtccaccggacctc

SEQ ID NO: 124978 - DNA, 25 bp, Homo sapien
gaaatgtctctgaccaccggacctc

SEQ ID NO: 124979 - DNA, 25 bp, Homo sapien
ggaagccttctcaggttccggaccc

SEQ ID NO: 124980 - DNA, 25 bp, Homo sapien
ggaagccttctctggttccggaccc

SEQ ID NO: 124981 - DNA, 25 bp, Homo sapien
tcatggtcttctgttcgttgacttc

SEQ ID NO: 124982 - DNA, 25 bp, Homo sapien
tcatggtcttctcttcgttgacttc

SEQ ID NO: 124983 - DNA, 25 bp, Homo sapien
cgttcttcgtcgtcggtccgcgaac

SEQ ID NO: 124984 - DNA, 25 bp, Homo sapien
cgttcttcgtcgacggtccgcgaac

SEQ ID NO: 124985 - DNA, 25 bp, Homo sapien
cggttctctccctgtaatacgtcga

SEQ ID NO: 124986 - DNA, 25 bp, Homo sapien
cggttctctcccagtaatacgtcga

SEQ ID NO: 124987 - DNA, 25 bp, Homo sapien
acctcttcgtgttcgtatatctgat

SEQ ID NO: 124988 - DNA, 25 bp, Homo sapien
acctcttcgtgtacgtatatctgat

SEQ ID NO: 124989 - DNA, 25 bp, Homo sapien
aggtcgtctgtgacgttctgtcgta

SEQ ID NO: 124990 - DNA, 25 bp, Homo sapien
aggtcgtctgtgtcgttctgtcgta

SEQ ID NO: 124991 - DNA, 25 bp, Homo sapien
agacgtcgaggaactacgcgtggta

SEQ ID NO: 124992 - DNA, 25 bp, Homo sapien
agacgtcgaggatctacgcgtggta

SEQ ID NO: 124993 - DNA, 25 bp, Homo sapien
tttgaaatgactgatgtctcccgac

SEQ ID NO: 124994 - DNA, 25 bp, Homo sapien
tttgaaatgactcatgtctcccgac

SEQ ID NO: 124995 - DNA, 25 bp, Homo sapien
acgtaggatttgacaacttatcaac

SEQ ID NO: 124996 - DNA, 25 bp, Homo sapien
acgtaggatttgtcaacttatcaac

SEQ ID NO: 124997 - DNA, 25 bp, Homo sapien
ttcggggtatgtaattcgttgacaa

SEQ ID NO: 124998 - DNA, 25 bp, Homo sapien
ttcggggtatgttattcgttgacaa

SEQ ID NO: 124999 - DNA, 25 bp, Homo sapien
gtggtggtcaaaatatctccctata

SEQ ID NO: 125000 - DNA, 25 bp, Homo sapien
gtggtggtcaaattatctccctata

SEQ ID NO: 125001 - DNA, 25 bp, Homo sapien
tggtagtacaggttgtgtcccccag

SEQ ID NO: 125002 - DNA, 25 bp, Homo sapien
tggtagtacaggatgtgtcccccag

SEQ ID NO: 125003 - DNA, 25 bp, Homo sapien
cctgtaggccagaaatacaacccta

SEQ ID NO: 125004 - DNA, 25 bp, Homo sapien
cctgtaggccagtaatacaacccta

SEQ ID NO: 125005 - DNA, 25 bp, Homo sapien
ataagtacctttcacggaaggtgac

SEQ ID NO: 125006 - DNA, 25 bp, Homo sapien
ataagtacctttgacggaaggtgac

SEQ ID NO: 125007 - DNA, 25 bp, Homo sapien
gacgacaccttcagcgggactgagc

SEQ ID NO: 125008 - DNA, 25 bp, Homo sapien
gacgacaccttctgcgggactgagc

SEQ ID NO: 125009 - DNA, 25 bp, Homo sapien
actagaccgttcttcgcggaccggg

SEQ ID NO: 125010 - DNA, 25 bp, Homo sapien
actagaccgttcatcgcggaccggg

SEQ ID NO: 125011 - DNA, 25 bp, Homo sapien
caacttcacccgtgtctcactggtt

SEQ ID NO: 125012 - DNA, 25 bp, Homo sapien
caacttcacccgagtctcactggtt

SEQ ID NO: 125013 - DNA, 25 bp, Homo sapien
gaaagaactcattcatcacttggtt

SEQ ID NO: 125014 - DNA, 25 bp, Homo sapien
gaaagaactcatacatcacttggtt

SEQ ID NO: 125015 - DNA, 25 bp, Homo sapien
taaatcgatagtttcagtctacaga

SEQ ID NO: 125016 - DNA, 25 bp, Homo sapien
taaatcgatagtatcagtctacaga

SEQ ID NO: 125017 - DNA, 25 bp, Homo sapien
acttattccattgacaggtcagtag

SEQ ID NO: 125018 - DNA, 25 bp, Homo sapien
acttattccattcacaggtcagtag

SEQ ID NO: 125019 - DNA, 25 bp, Homo sapien
cccattcacaggagacggtcgacga

SEQ ID NO: 125020 - DNA, 25 bp, Homo sapien
cccattcacaggtgacggtcgacga

SEQ ID NO: 125021 - DNA, 25 bp, Homo sapien
ggtttagtggaaacgttagacactc

SEQ ID NO: 125022 - DNA, 25 bp, Homo sapien
ggtttagtggaatcgttagacactc

SEQ ID NO: 125023 - DNA, 25 bp, Homo sapien
gtgacctgtggaatcttcgacactt

SEQ ID NO: 125024 - DNA, 25 bp, Homo sapien
gtgacctgtggattcttcgacactt

SEQ ID NO: 125025 - DNA, 25 bp, Homo sapien
cggaaatcgggttcagtgtgagtct

SEQ ID NO: 125026 - DNA, 25 bp, Homo sapien
cggaaatcgggtacagtgtgagtct

SEQ ID NO: 125027 - DNA, 25 bp, Homo sapien
ccccacaggcgttagtcgcgggtgt

SEQ ID NO: 125028 - DNA, 25 bp, Homo sapien
ccccacaggcgtaagtcgcgggtgt

SEQ ID NO: 125029 - DNA, 25 bp, Homo sapien
ctcaacagggagtgactcgaggtcg

SEQ ID NO: 125030 - DNA, 25 bp, Homo sapien
ctcaacagggagagactcgaggtcg

SEQ ID NO: 125031 - DNA, 25 bp, Homo sapien
tgtgacgggtgcaagagtcacctgt

SEQ ID NO: 125032 - DNA, 25 bp, Homo sapien
tgtgacgggtgctagagtcacctgt

SEQ ID NO: 125033 - DNA, 25 bp, Homo sapien
tcgacccggtgtcatccttgtagtg

SEQ ID NO: 125034 - DNA, 25 bp, Homo sapien
tcgacccggtgtgatccttgtagtg

SEQ ID NO: 125035 - DNA, 25 bp, Homo sapien
tacgctctccggtcggcccgtagtg

SEQ ID NO: 125036 - DNA, 25 bp, Homo sapien
tacgctctccggacggcccgtagtg

SEQ ID NO: 125037 - DNA, 25 bp, Homo sapien
agtgaccccgtctaggcctcagtcg

SEQ ID NO: 125038 - DNA, 25 bp, Homo sapien
agtgaccccgtcaaggcctcagtcg

SEQ ID NO: 125039 - DNA, 25 bp, Homo sapien
cgtgaccccgtttgaagtctgtacc

SEQ ID NO: 125040 - DNA, 25 bp, Homo sapien
cgtgaccccgttagaagtctgtacc

SEQ ID NO: 125041 - DNA, 25 bp, Homo sapien
gatctttccacgtttgtacattgaa

SEQ ID NO: 125042 - DNA, 25 bp, Homo sapien
gatctttccacgattgtacattgaa

SEQ ID NO: 125043 - DNA, 25 bp, Homo sapien
ccccagacagacatgtcaatgagta

SEQ ID NO: 125044 - DNA, 25 bp, Homo sapien
ccccagacagacttgtcaatgagta

SEQ ID NO: 125045 - DNA, 25 bp, Homo sapien
acatgtacattgtacaccggtacgg

SEQ ID NO: 125046 - DNA, 25 bp, Homo sapien
acatgtacattgaacaccggtacgg

SEQ ID NO: 125047 - DNA, 25 bp, Homo sapien
agacggtgcttgaacctgtctactc

SEQ ID NO: 125048 - DNA, 25 bp, Homo sapien
agacggtgcttgtacctgtctactc

SEQ ID NO: 125049 - DNA, 25 bp, Homo sapien
aggtacgggggaactccgtgacaac

SEQ ID NO: 125050 - DNA, 25 bp, Homo sapien
aggtacgggggatctccgtgacaac

SEQ ID NO: 125051 - DNA, 25 bp, Homo sapien
agagaagtaccgaaaacctgtcaat

SEQ ID NO: 125052 - DNA, 25 bp, Homo sapien
agagaagtaccgtaaacctgtcaat

SEQ ID NO: 125053 - DNA, 25 bp, Homo sapien
acgatatgtgttaaaacgtaccaat

SEQ ID NO: 125054 - DNA, 25 bp, Homo sapien
acgatatgtgtttaaacgtaccaat

SEQ ID NO: 125055 - DNA, 25 bp, Homo sapien
gataagattttgtacgcacacttta

SEQ ID NO: 125056 - DNA, 25 bp, Homo sapien
gataagattttgaacgcacacttta

SEQ ID NO: 125057 - DNA, 25 bp, Homo sapien
cacataagatttcagtgacctttaa

SEQ ID NO: 125058 - DNA, 25 bp, Homo sapien
cacataagatttgagtgacctttaa

SEQ ID NO: 125059 - DNA, 25 bp, Homo sapien
ccaaagaagtcagaaccgatataga

SEQ ID NO: 125060 - DNA, 25 bp, Homo sapien
ccaaagaagtcacaaccgatataga

SEQ ID NO: 125061 - DNA, 25 bp, Homo sapien
agaactacaacgacggacgtaagta

SEQ ID NO: 125062 - DNA, 25 bp, Homo sapien
agaactacaacgtcggacgtaagta

SEQ ID NO: 125063 - DNA, 25 bp, Homo sapien
cccagagacaagtccgtaaagatag

SEQ ID NO: 125064 - DNA, 25 bp, Homo sapien
cccagagacaagaccgtaaagatag

SEQ ID NO: 125065 - DNA, 25 bp, Homo sapien
ggacccagtgtaaacaccgactccg

SEQ ID NO: 125066 - DNA, 25 bp, Homo sapien
ggacccagtgtatacaccgactccg

SEQ ID NO: 125067 - DNA, 25 bp, Homo sapien
aggtttaaaaggttccatctgtaac

SEQ ID NO: 125068 - DNA, 25 bp, Homo sapien
aggtttaaaaggatccatctgtaac

SEQ ID NO: 125069 - DNA, 25 bp, Homo sapien
gaatcttaatggtacaccatgttta

SEQ ID NO: 125070 - DNA, 25 bp, Homo sapien
gaatcttaatggaacaccatgttta

SEQ ID NO: 125071 - DNA, 25 bp, Homo sapien
ttttcgtactgaactccaaggaact

SEQ ID NO: 125072 - DNA, 25 bp, Homo sapien
ttttcgtactgatctccaaggaact

SEQ ID NO: 125073 - DNA, 25 bp, Homo sapien
gtagttccactgtcattaagtgaca

SEQ ID NO: 125074 - DNA, 25 bp, Homo sapien
gtagttccactgacattaagtgaca

SEQ ID NO: 125075 - DNA, 25 bp, Homo sapien
agtgtcctatacactagttatttga

SEQ ID NO: 125076 - DNA, 25 bp, Homo sapien
agtgtcctatactctagttatttga

SEQ ID NO: 125077 - DNA, 25 bp, Homo sapien
gtataaccttaaatgacttgttcag

SEQ ID NO: 125078 - DNA, 25 bp, Homo sapien
gtataaccttaattgacttgttcag

SEQ ID NO: 125079 - DNA, 25 bp, Homo sapien
acaagttcacccatgtcgtagaagt

SEQ ID NO: 125080 - DNA, 25 bp, Homo sapien
acaagttcacccttgtcgtagaagt

SEQ ID NO: 125081 - DNA, 25 bp, Homo sapien
ttcgggtgccccacgtcgtaggagt

SEQ ID NO: 125082 - DNA, 25 bp, Homo sapien
ttcgggtgcccctcgtcgtaggagt

SEQ ID NO: 125083 - DNA, 25 bp, Homo sapien
acttaatgtttcatttcttagacgg

SEQ ID NO: 125084 - DNA, 25 bp, Homo sapien
acttaatgtttcttttcttagacgg

SEQ ID NO: 125085 - DNA, 25 bp, Homo sapien
atctagaaagttcttggtggtgacc

SEQ ID NO: 125086 - DNA, 25 bp, Homo sapien
atctagaaagttgttggtggtgacc

SEQ ID NO: 125087 - DNA, 25 bp, Homo sapien
tttaatttctgtacagtgagtgtcc

SEQ ID NO: 125088 - DNA, 25 bp, Homo sapien
tttaatttctgttcagtgagtgtcc

SEQ ID NO: 125089 - DNA, 25 bp, Homo sapien
ctcacttattcaatgtatctatttg

SEQ ID NO: 125090 - DNA, 25 bp, Homo sapien
ctcacttattcattgtatctatttg

SEQ ID NO: 125091 - DNA, 25 bp, Homo sapien
ctcttgtcgaattcacgtctctgct

SEQ ID NO: 125092 - DNA, 25 bp, Homo sapien
ctcttgtcgaatacacgtctctgct

SEQ ID NO: 125093 - DNA, 25 bp, Homo sapien
ggacactttcggttccttctcgagt

SEQ ID NO: 125094 - DNA, 25 bp, Homo sapien
ggacactttcggatccttctcgagt

SEQ ID NO: 125095 - DNA, 25 bp, Homo sapien
agtacgatcaacaatctcggtcgat

SEQ ID NO: 125096 - DNA, 25 bp, Homo sapien
agtacgatcaactatctcggtcgat

SEQ ID NO: 125097 - DNA, 25 bp, Homo sapien
gtgtcttgatcaaataagtcatcat

SEQ ID NO: 125098 - DNA, 25 bp, Homo sapien
gtgtcttgatcatataagtcatcat

SEQ ID NO: 125099 - DNA, 25 bp, Homo sapien
tgtgtgtacccgacttcgaaggtct

SEQ ID NO: 125100 - DNA, 25 bp, Homo sapien
tgtgtgtacccgtcttcgaaggtct

SEQ ID NO: 125101 - DNA, 25 bp, Homo sapien
gtacttgagggttatcgacttgact

SEQ ID NO: 125102 - DNA, 25 bp, Homo sapien
gtacttgagggtaatcgacttgact

SEQ ID NO: 125103 - DNA, 25 bp, Homo sapien
gtctgtaggacgagtgactagttct

SEQ ID NO: 125104 - DNA, 25 bp, Homo sapien
gtctgtaggacgtgtgactagttct

SEQ ID NO: 125105 - DNA, 25 bp, Homo sapien
ccagtttgtgtcagtggacgtatgc

SEQ ID NO: 125106 - DNA, 25 bp, Homo sapien
ccagtttgtgtctgtggacgtatgc

SEQ ID NO: 125107 - DNA, 25 bp, Homo sapien
ccctcgtggtcgagacgtagttaga

SEQ ID NO: 125108 - DNA, 25 bp, Homo sapien
ccctcgtggtcgtgacgtagttaga

SEQ ID NO: 125109 - DNA, 25 bp, Homo sapien
tacccagacgtgtacggaaagtttg

SEQ ID NO: 125110 - DNA, 25 bp, Homo sapien
tacccagacgtgaacggaaagtttg

SEQ ID NO: 125111 - DNA, 25 bp, Homo sapien
actataagtgtaaccaagatcctag

SEQ ID NO: 125112 - DNA, 25 bp, Homo sapien
actataagtgtatccaagatcctag

SEQ ID NO: 125113 - DNA, 25 bp, Homo sapien
ggtctcgttcctctgtgaattctag

SEQ ID NO: 125114 - DNA, 25 bp, Homo sapien
ggtctcgttcctgtgtgaattctag

SEQ ID NO: 125115 - DNA, 25 bp, Homo sapien
ttgttggactgtcaactactgtaac

SEQ ID NO: 125116 - DNA, 25 bp, Homo sapien
ttgttggactgtgaactactgtaac

SEQ ID NO: 125117 - DNA, 25 bp, Homo sapien
tcgtctgcctcaacgaaggtacagt

SEQ ID NO: 125118 - DNA, 25 bp, Homo sapien
tcgtctgcctcatcgaaggtacagt

SEQ ID NO: 125119 - DNA, 25 bp, Homo sapien
acttgtgtcccgtcgaactgtcgag

SEQ ID NO: 125120 - DNA, 25 bp, Homo sapien
acttgtgtcccgacgaactgtcgag

SEQ ID NO: 125121 - DNA, 25 bp, Homo sapien
ttttacatgtcatcaaacttgtgag

SEQ ID NO: 125122 - DNA, 25 bp, Homo sapien
ttttacatgtcaacaaacttgtgag

SEQ ID NO: 125123 - DNA, 25 bp, Homo sapien
gtcttctgggtcacctgacacttga

SEQ ID NO: 125124 - DNA, 25 bp, Homo sapien
gtcttctgggtctcctgacacttga

SEQ ID NO: 125125 - DNA, 25 bp, Homo sapien
gtctcttggcactcgacgcgctgga

SEQ ID NO: 125126 - DNA, 25 bp, Homo sapien
gtctcttggcacacgacgcgctgga

SEQ ID NO: 125127 - DNA, 25 bp, Homo sapien
cgtcctaggccgtgtcctgcatgtc

SEQ ID NO: 125128 - DNA, 25 bp, Homo sapien
cgtcctaggccgagtcctgcatgtc

SEQ ID NO: 125129 - DNA, 25 bp, Homo sapien
ccctggtccgacgctcctcagtagg

SEQ ID NO: 125130 - DNA, 25 bp, Homo sapien
ccctggtccgaccctcctcagtagg

SEQ ID NO: 125131 - DNA, 25 bp, Homo sapien
ccgtctccaaacttgtcacgtctgt

SEQ ID NO: 125132 - DNA, 25 bp, Homo sapien
ccgtctccaaacatgtcacgtctgt

SEQ ID NO: 125133 - DNA, 25 bp, Homo sapien
taaagtacttaagacttgtgatctc

SEQ ID NO: 125134 - DNA, 25 bp, Homo sapien
taaagtacttaacacttgtgatctc

SEQ ID NO: 125135 - DNA, 25 bp, Homo sapien
gtcacaaaatgactctggtcgtaac

SEQ ID NO: 125136 - DNA, 25 bp, Homo sapien
gtcacaaaatgagtctggtcgtaac

SEQ ID NO: 125137 - DNA, 25 bp, Homo sapien
ggtcctttacctgtcactggaagag

SEQ ID NO: 125138 - DNA, 25 bp, Homo sapien
ggtcctttacctctcactggaagag

SEQ ID NO: 125139 - DNA, 25 bp, Homo sapien
cggtgctacaaccaggagtcgaaga

SEQ ID NO: 125140 - DNA, 25 bp, Homo sapien
cggtgctacaacgaggagtcgaaga

SEQ ID NO: 125141 - DNA, 25 bp, Homo sapien
aggacctcgctaaggtcgaacaaag

SEQ ID NO: 125142 - DNA, 25 bp, Homo sapien
aggacctcgctatggtcgaacaaag

SEQ ID NO: 125143 - DNA, 25 bp, Homo sapien
gttacttctacgttatcagtaacag

SEQ ID NO: 125144 - DNA, 25 bp, Homo sapien
gttacttctacgatatcagtaacag

SEQ ID NO: 125145 - DNA, 25 bp, Homo sapien
agattgtacacgtcgtcgagtctca

SEQ ID NO: 125146 - DNA, 25 bp, Homo sapien
agattgtacacgacgtcgagtctca

SEQ ID NO: 125147 - DNA, 25 bp, Homo sapien
cgtaacgtgtcacctcacgtttcca

SEQ ID NO: 125148 - DNA, 25 bp, Homo sapien
cgtaacgtgtcagctcacgtttcca

SEQ ID NO: 125149 - DNA, 25 bp, Homo sapien
aaaactcgtcgaggtggagcttgtg

SEQ ID NO: 125150 - DNA, 25 bp, Homo sapien
aaaactcgtcgacgtggagcttgtg

SEQ ID NO: 125151 - DNA, 25 bp, Homo sapien
tatcctcaccgaggagacccgtacg

SEQ ID NO: 125152 - DNA, 25 bp, Homo sapien
tatcctcaccgacgagacccgtacg

SEQ ID NO: 125153 - DNA, 25 bp, Homo sapien
acattatgtcgtagttggaatccga

SEQ ID NO: 125154 - DNA, 25 bp, Homo sapien
acattatgtcgttgttggaatccga

SEQ ID NO: 125155 - DNA, 25 bp, Homo sapien
aacctcgtctgtctgtaccttcgac

SEQ ID NO: 125156 - DNA, 25 bp, Homo sapien
aacctcgtctgtgtgtaccttcgac

SEQ ID NO: 125157 - DNA, 25 bp, Homo sapien
agtaacagccggagtttccctccga

SEQ ID NO: 125158 - DNA, 25 bp, Homo sapien
agtaacagccggtgtttccctccga

SEQ ID NO: 125159 - DNA, 25 bp, Homo sapien
taaaagacagagtgggttacaccca

SEQ ID NO: 125160 - DNA, 25 bp, Homo sapien
taaaagacagagagggttacaccca

SEQ ID NO: 125161 - DNA, 25 bp, Homo sapien
tgaaataaccaatggagatccggac

SEQ ID NO: 125162 - DNA, 25 bp, Homo sapien
tgaaataaccaaaggagatccggac

SEQ ID NO: 125163 - DNA, 25 bp, Homo sapien
tgaagaagctaaaagagacctctga

SEQ ID NO: 125164 - DNA, 25 bp, Homo sapien
tgaagaagctaatagagacctctga

SEQ ID NO: 125165 - DNA, 25 bp, Homo sapien
ggaggaaccgggactccttccgact

SEQ ID NO: 125166 - DNA, 25 bp, Homo sapien
ggaggaaccgggtctccttccgact

SEQ ID NO: 125167 - DNA, 25 bp, Homo sapien
gagaaacaggagtttcgtcccttcc

SEQ ID NO: 125168 - DNA, 25 bp, Homo sapien
gagaaacaggagattcgtcccttcc

SEQ ID NO: 125169 - DNA, 25 bp, Homo sapien
aaagacaggaacaggtgcccggacg

SEQ ID NO: 125170 - DNA, 25 bp, Homo sapien
aaagacaggaactggtgcccggacg

SEQ ID NO: 125171 - DNA, 25 bp, Homo sapien
acaaggtcggaatcttcgaccctgc

SEQ ID NO: 125172 - DNA, 25 bp, Homo sapien
acaaggtcggaaacttcgaccctgc

SEQ ID NO: 125173 - DNA, 25 bp, Homo sapien
aggaggtgacgtacaccgccgtccc

SEQ ID NO: 125174 - DNA, 25 bp, Homo sapien
aggaggtgacgttcaccgccgtccc

SEQ ID NO: 125175 - DNA, 25 bp, Homo sapien
ggggcgaccgtcaccgatgtcacct

SEQ ID NO: 125176 - DNA, 25 bp, Homo sapien
ggggcgaccgtctccgatgtcacct

SEQ ID NO: 125177 - DNA, 25 bp, Homo sapien
agggaacgaagtacagactcttccg

SEQ ID NO: 125178 - DNA, 25 bp, Homo sapien
agggaacgaagttcagactcttccg

SEQ ID NO: 125179 - DNA, 25 bp, Homo sapien
agagagaccggtcacacctcggccg

SEQ ID NO: 125180 - DNA, 25 bp, Homo sapien
agagagaccggtgacacctcggccg

SEQ ID NO: 125181 - DNA, 25 bp, Homo sapien
cgaccagaggatacacaccgccgta

SEQ ID NO: 125182 - DNA, 25 bp, Homo sapien
cgaccagaggattcacaccgccgta

SEQ ID NO: 125183 - DNA, 25 bp, Homo sapien
gcaccgactgcgagtctggagcctc

SEQ ID NO: 125184 - DNA, 25 bp, Homo sapien
gcaccgactgcgtgtctggagcctc

SEQ ID NO: 125185 - DNA, 25 bp, Homo sapien
aagtcgacttgctctggaactcgtc

SEQ ID NO: 125186 - DNA, 25 bp, Homo sapien
aagtcgacttgcactggaactcgtc

SEQ ID NO: 125187 - DNA, 25 bp, Homo sapien
tatgttaaaacgagaagacaccgta

SEQ ID NO: 125188 - DNA, 25 bp, Homo sapien
tatgttaaaacgtgaagacaccgta

SEQ ID NO: 125189 - DNA, 25 bp, Homo sapien
aatcggtcaatttaagaacaaacct

SEQ ID NO: 125190 - DNA, 25 bp, Homo sapien
aatcggtcaattaaagaacaaacct

SEQ ID NO: 125191 - DNA, 25 bp, Homo sapien
aaccggaccatgaggaactacttcc

SEQ ID NO: 125192 - DNA, 25 bp, Homo sapien
aaccggaccatgtggaactacttcc

SEQ ID NO: 125193 - DNA, 25 bp, Homo sapien
aagaagactcagtggggactttgtc

SEQ ID NO: 125194 - DNA, 25 bp, Homo sapien
aagaagactcagaggggactttgtc

SEQ ID NO: 125195 - DNA, 25 bp, Homo sapien
aacacgaagggctctcgggattctt

SEQ ID NO: 125196 - DNA, 25 bp, Homo sapien
aacacgaagggcactcgggattctt

SEQ ID NO: 125197 - DNA, 25 bp, Homo sapien
tcattgtgatccttctggagttata

SEQ ID NO: 125198 - DNA, 25 bp, Homo sapien
tcattgtgatccatctggagttata

SEQ ID NO: 125199 - DNA, 25 bp, Homo sapien
acatctacgatcatgggaatctaat

SEQ ID NO: 125200 - DNA, 25 bp, Homo sapien
acatctacgatcttgggaatctaat

SEQ ID NO: 125201 - DNA, 25 bp, Homo sapien
ttacggactcattggaatttaaact

SEQ ID NO: 125202 - DNA, 25 bp, Homo sapien
ttacggactcataggaatttaaact

SEQ ID NO: 125203 - DNA, 25 bp, Homo sapien
atgatttgtcgtgaaacttaccact

SEQ ID NO: 125204 - DNA, 25 bp, Homo sapien
atgatttgtcgtcaaacttaccact

SEQ ID NO: 125205 - DNA, 25 bp, Homo sapien
gcccaggggtgttagaaattcgcct

SEQ ID NO: 125206 - DNA, 25 bp, Homo sapien
gcccaggggtgtaagaaattcgcct

SEQ ID NO: 125207 - DNA, 25 bp, Homo sapien
tcgaagtactacaggaacactgcac

SEQ ID NO: 125208 - DNA, 25 bp, Homo sapien
tcgaagtactactggaacactgcac

SEQ ID NO: 125209 - DNA, 25 bp, Homo sapien
gatacacggacctcacttctaagac

SEQ ID NO: 125210 - DNA, 25 bp, Homo sapien
gatacacggaccacacttctaagac

SEQ ID NO: 125211 - DNA, 25 bp, Homo sapien
catagaagtgcaaccagtcgacaat

SEQ ID NO: 125212 - DNA, 25 bp, Homo sapien
catagaagtgcatccagtcgacaat

SEQ ID NO: 125213 - DNA, 25 bp, Homo sapien
aagtagtagtggtaccgctacatga

SEQ ID NO: 125214 - DNA, 25 bp, Homo sapien
aagtagtagtggaaccgctacatga

SEQ ID NO: 125215 - DNA, 25 bp, Homo sapien
gtcacagacacttgatctatagtag

SEQ ID NO: 125216 - DNA, 25 bp, Homo sapien
gtcacagacactagatctatagtag

SEQ ID NO: 125217 - DNA, 25 bp, Homo sapien
atttacacaccttgttacgatgtag

SEQ ID NO: 125218 - DNA, 25 bp, Homo sapien
atttacacacctagttacgatgtag

SEQ ID NO: 125219 - DNA, 25 bp, Homo sapien
aagtattccgaaacacagtaatgtt

SEQ ID NO: 125220 - DNA, 25 bp, Homo sapien
aagtattccgaatcacagtaatgtt

SEQ ID NO: 125221 - DNA, 25 bp, Homo sapien
ttaattatgtcagacccgtatattg

SEQ ID NO: 125222 - DNA, 25 bp, Homo sapien
ttaattatgtcacacccgtatattg

SEQ ID NO: 125223 - DNA, 25 bp, Homo sapien
gtttagggttttgtgaccgttcttc

SEQ ID NO: 125224 - DNA, 25 bp, Homo sapien
gtttagggttttctgaccgttcttc

SEQ ID NO: 125225 - DNA, 25 bp, Homo sapien
cttgggtttttcaggtcgtctctta

SEQ ID NO: 125226 - DNA, 25 bp, Homo sapien
cttgggtttttctggtcgtctctta

SEQ ID NO: 125227 - DNA, 25 bp, Homo sapien
atgaggaagtccgtgagaccccgta

SEQ ID NO: 125228 - DNA, 25 bp, Homo sapien
atgaggaagtccctgagaccccgta

SEQ ID NO: 125229 - DNA, 25 bp, Homo sapien
acgtactaggtcctcgcggcgacca

SEQ ID NO: 125230 - DNA, 25 bp, Homo sapien
acgtactaggtcgtcgcggcgacca

SEQ ID NO: 125231 - DNA, 25 bp, Homo sapien
ccaggtcgcgcgtgcggtgctacac

SEQ ID NO: 125232 - DNA, 25 bp, Homo sapien
ccaggtcgcgcgagcggtgctacac

SEQ ID NO: 125233 - DNA, 25 bp, Homo sapien
gcgcgggtgctgcagtgacatccac

SEQ ID NO: 125234 - DNA, 25 bp, Homo sapien
gcgcgggtgctggagtgacatccac

SEQ ID NO: 125235 - DNA, 25 bp, Homo sapien
ggtccgagggacgagaccaacttca

SEQ ID NO: 125236 - DNA, 25 bp, Homo sapien
ggtccgagggaccagaccaacttca

SEQ ID NO: 125237 - DNA, 25 bp, Homo sapien
ctgtctgaagaacctgggaattacc

SEQ ID NO: 125238 - DNA, 25 bp, Homo sapien
ctgtctgaagaagctgggaattacc

SEQ ID NO: 125239 - DNA, 25 bp, Homo sapien
cttaaaagaatgaggtactactcct

SEQ ID NO: 125240 - DNA, 25 bp, Homo sapien
cttaaaagaatgtggtactactcct

SEQ ID NO: 125241 - DNA, 25 bp, Homo sapien
tgtccaaagttttgagagactctct

SEQ ID NO: 125242 - DNA, 25 bp, Homo sapien
tgtccaaagtttagagagactctct

SEQ ID NO: 125243 - DNA, 25 bp, Homo sapien
tccgataactattttggtagaccct

SEQ ID NO: 125244 - DNA, 25 bp, Homo sapien
tccgataactatattggtagaccct

SEQ ID NO: 125245 - DNA, 25 bp, Homo sapien
ccagtccgaaactcttttaattcgg

SEQ ID NO: 125246 - DNA, 25 bp, Homo sapien
ccagtccgaaacacttttaattcgg

SEQ ID NO: 125247 - DNA, 25 bp, Homo sapien
caaaccgaagggttcctagggtggt

SEQ ID NO: 125248 - DNA, 25 bp, Homo sapien
caaaccgaagggatcctagggtggt

SEQ ID NO: 125249 - DNA, 25 bp, Homo sapien
aaacgagacagaagttccggcgaca

SEQ ID NO: 125250 - DNA, 25 bp, Homo sapien
aaacgagacagatgttccggcgaca

SEQ ID NO: 125251 - DNA, 25 bp, Homo sapien
tgttttagaaaatgtatgccttacc

SEQ ID NO: 125252 - DNA, 25 bp, Homo sapien
tgttttagaaaaagtatgccttacc

SEQ ID NO: 125253 - DNA, 25 bp, Homo sapien
ggttgttaacggaaagttcccttcc

SEQ ID NO: 125254 - DNA, 25 bp, Homo sapien
ggttgttaacggtaagttcccttcc

SEQ ID NO: 125255 - DNA, 25 bp, Homo sapien
gagatgtttcctattgtccataaac

SEQ ID NO: 125256 - DNA, 25 bp, Homo sapien
gagatgtttccttttgtccataaac

SEQ ID NO: 125257 - DNA, 25 bp, Homo sapien
agttttcggattttaccatataacg

SEQ ID NO: 125258 - DNA, 25 bp, Homo sapien
agttttcggattataccatataacg

SEQ ID NO: 125259 - DNA, 25 bp, Homo sapien
aggtattggttacaacccgtagttc

SEQ ID NO: 125260 - DNA, 25 bp, Homo sapien
aggtattggttagaacccgtagttc

SEQ ID NO: 125261 - DNA, 25 bp, Homo sapien
ttttttacgtatgtaaccttgccgt

SEQ ID NO: 125262 - DNA, 25 bp, Homo sapien
ttttttacgtatctaaccttgccgt

SEQ ID NO: 125263 - DNA, 25 bp, Homo sapien
ggtttgtctctgagtacctcatcta

SEQ ID NO: 125264 - DNA, 25 bp, Homo sapien
ggtttgtctctgtgtacctcatcta

SEQ ID NO: 125265 - DNA, 25 bp, Homo sapien
gtgatctttatatgtaatctgtctc

SEQ ID NO: 125266 - DNA, 25 bp, Homo sapien
gtgatctttataagtaatctgtctc

SEQ ID NO: 125267 - DNA, 25 bp, Homo sapien
gtgatcattacaggaactcctacta

SEQ ID NO: 125268 - DNA, 25 bp, Homo sapien
gtgatcattacacgaactcctacta

SEQ ID NO: 125269 - DNA, 25 bp, Homo sapien
gtggagtggtatcgagacgtcccac

SEQ ID NO: 125270 - DNA, 25 bp, Homo sapien
gtggagtggtatggagacgtcccac

SEQ ID NO: 125271 - DNA, 25 bp, Homo sapien
gactggaggtccaggacgtcgtcca

SEQ ID NO: 125272 - DNA, 25 bp, Homo sapien
gactggaggtcctggacgtcgtcca

SEQ ID NO: 125273 - DNA, 25 bp, Homo sapien
accgtccatccagtcgacgtagtga

SEQ ID NO: 125274 - DNA, 25 bp, Homo sapien
accgtccatccactcgacgtagtga

SEQ ID NO: 125275 - DNA, 25 bp, Homo sapien
aaggatcaccctacagaagaatcga

SEQ ID NO: 125276 - DNA, 25 bp, Homo sapien
aaggatcacccttcagaagaatcga

SEQ ID NO: 125277 - DNA, 25 bp, Homo sapien
cgaggtgctacctctgagcataggg

SEQ ID NO: 125278 - DNA, 25 bp, Homo sapien
cgaggtgctaccactgagcataggg

SEQ ID NO: 125279 - DNA, 25 bp, Homo sapien
tccagtatgtgcatgaggacctggg

SEQ ID NO: 125280 - DNA, 25 bp, Homo sapien
tccagtatgtgcttgaggacctggg

SEQ ID NO: 125281 - DNA, 25 bp, Homo sapien
tgaaccaaacccttcggaccagagg

SEQ ID NO: 125282 - DNA, 25 bp, Homo sapien
tgaaccaaacccatcggaccagagg

SEQ ID NO: 125283 - DNA, 25 bp, Homo sapien
aaccgattgaggtactcgtccatcc

SEQ ID NO: 125284 - DNA, 25 bp, Homo sapien
aaccgattgaggaactcgtccatcc

SEQ ID NO: 125285 - DNA, 25 bp, Homo sapien
agtatctgaacctcgtaatagtgat

SEQ ID NO: 125286 - DNA, 25 bp, Homo sapien
agtatctgaaccacgtaatagtgat

SEQ ID NO: 125287 - DNA, 25 bp, Homo sapien
acgaaaagagacgatgactgatact

SEQ ID NO: 125288 - DNA, 25 bp, Homo sapien
acgaaaagagaccatgactgatact

SEQ ID NO: 125289 - DNA, 25 bp, Homo sapien
ggtttaggactccttaacagtatat

SEQ ID NO: 125290 - DNA, 25 bp, Homo sapien
ggtttaggactcgttaacagtatat

SEQ ID NO: 125291 - DNA, 25 bp, Homo sapien
gggcgtgtcttgatcaaataagtca

SEQ ID NO: 125292 - DNA, 25 bp, Homo sapien
gggcgtgtcttgttcaaataagtca

SEQ ID NO: 125293 - DNA, 25 bp, Homo sapien
ggtgttgcggtctgtgctacgaaga

SEQ ID NO: 125294 - DNA, 25 bp, Homo sapien
ggtgttgcggtcagtgctacgaaga

SEQ ID NO: 125295 - DNA, 25 bp, Homo sapien
gtgtccactgcgtggtatactagta

SEQ ID NO: 125296 - DNA, 25 bp, Homo sapien
gtgtccactgcgaggtatactagta

SEQ ID NO: 125297 - DNA, 25 bp, Homo sapien
gttcccgacgttgacagtgactata

SEQ ID NO: 125298 - DNA, 25 bp, Homo sapien
gttcccgacgttcacagtgactata

SEQ ID NO: 125299 - DNA, 25 bp, Homo sapien
ggttctcacgtactcgagggttatc

SEQ ID NO: 125300 - DNA, 25 bp, Homo sapien
ggttctcacgtagtcgagggttatc

SEQ ID NO: 125301 - DNA, 25 bp, Homo sapien
gtagtggtcagtcgtcggtttctgg

SEQ ID NO: 125302 - DNA, 25 bp, Homo sapien
gtagtggtcagtggtcggtttctgg

SEQ ID NO: 125303 - DNA, 25 bp, Homo sapien
agtaagagtctgtgtgttaggtgat

SEQ ID NO: 125304 - DNA, 25 bp, Homo sapien
agtaagagtctgagtgttaggtgat

SEQ ID NO: 125305 - DNA, 25 bp, Homo sapien
gaacctcgttatagattctgtaact

SEQ ID NO: 125306 - DNA, 25 bp, Homo sapien
gaacctcgttattgattctgtaact

SEQ ID NO: 125307 - DNA, 25 bp, Homo sapien
gtgacactctcttattgtacctgaa

SEQ ID NO: 125308 - DNA, 25 bp, Homo sapien
gtgacactctctaattgtacctgaa

SEQ ID NO: 125309 - DNA, 25 bp, Homo sapien
actgtgtcctctgttattttgtaca

SEQ ID NO: 125310 - DNA, 25 bp, Homo sapien
actgtgtcctctcttattttgtaca

SEQ ID NO: 125311 - DNA, 25 bp, Homo sapien
aacagacttctgtaatttctgtaca

SEQ ID NO: 125312 - DNA, 25 bp, Homo sapien
aacagacttctgaaatttctgtaca

SEQ ID NO: 125313 - DNA, 25 bp, Homo sapien
tcagaaaaggggactgatctatgac

SEQ ID NO: 125314 - DNA, 25 bp, Homo sapien
tcagaaaaggggtctgatctatgac

SEQ ID NO: 125315 - DNA, 25 bp, Homo sapien
aatggtttttcattcgcgggagact

SEQ ID NO: 125316 - DNA, 25 bp, Homo sapien
aatggtttttcaatcgcgggagact

SEQ ID NO: 125317 - DNA, 25 bp, Homo sapien
cgacgtccacatacgcggcgacgga

SEQ ID NO: 125318 - DNA, 25 bp, Homo sapien
cgacgtccacattcgcggcgacgga

SEQ ID NO: 125319 - DNA, 25 bp, Homo sapien
gtcacgacgtcacttccggacgggc

SEQ ID NO: 125320 - DNA, 25 bp, Homo sapien
gtcacgacgtcagttccggacgggc

SEQ ID NO: 125321 - DNA, 25 bp, Homo sapien
gagtctccaacgactccacgggagg

SEQ ID NO: 125322 - DNA, 25 bp, Homo sapien
gagtctccaacgtctccacgggagg

SEQ ID NO: 125323 - DNA, 25 bp, Homo sapien
agtaatcaactattcgcttggagtg

SEQ ID NO: 125324 - DNA, 25 bp, Homo sapien
agtaatcaactaatcgcttggagtg

SEQ ID NO: 125325 - DNA, 25 bp, Homo sapien
gagtatgacattatccgttgttgac

SEQ ID NO: 125326 - DNA, 25 bp, Homo sapien
gagtatgacattttccgttgttgac

SEQ ID NO: 125327 - DNA, 25 bp, Homo sapien
tgaggataatcagtttccagttaac

SEQ ID NO: 125328 - DNA, 25 bp, Homo sapien
tgaggataatcactttccagttaac

SEQ ID NO: 125329 - DNA, 25 bp, Homo sapien
cttccctagttattgtctcagtcaa

SEQ ID NO: 125330 - DNA, 25 bp, Homo sapien
cttccctagttaatgtctcagtcaa

SEQ ID NO: 125331 - DNA, 25 bp, Homo sapien
atgcggaacgagtcgccgtaacaga

SEQ ID NO: 125332 - DNA, 25 bp, Homo sapien
atgcggaacgagacgccgtaacaga

SEQ ID NO: 125333 - DNA, 25 bp, Homo sapien
gaagacacacaaaccgaccgacgac

SEQ ID NO: 125334 - DNA, 25 bp, Homo sapien
gaagacacacaatccgaccgacgac

SEQ ID NO: 125335 - DNA, 25 bp, Homo sapien
tccgacgctacctgtttcactctac

SEQ ID NO: 125336 - DNA, 25 bp, Homo sapien
tccgacgctaccagtttcactctac

SEQ ID NO: 125337 - DNA, 25 bp, Homo sapien
ccttgaaacgttgactatacaagat

SEQ ID NO: 125338 - DNA, 25 bp, Homo sapien
ccttgaaacgttcactatacaagat

SEQ ID NO: 125339 - DNA, 25 bp, Homo sapien
cgtgtcaagttgctacttctctaaa

SEQ ID NO: 125340 - DNA, 25 bp, Homo sapien
cgtgtcaagttggtacttctctaaa

SEQ ID NO: 125341 - DNA, 25 bp, Homo sapien
tctgtgtgaatttctcgtatgcaaa

SEQ ID NO: 125342 - DNA, 25 bp, Homo sapien
tctgtgtgaattactcgtatgcaaa

SEQ ID NO: 125343 - DNA, 25 bp, Homo sapien
ctccgaactttttacgtacaggaaa

SEQ ID NO: 125344 - DNA, 25 bp, Homo sapien
ctccgaacttttaacgtacaggaaa

SEQ ID NO: 125345 - DNA, 25 bp, Homo sapien
ctactatactctgttgacaatgaaa

SEQ ID NO: 125346 - DNA, 25 bp, Homo sapien
ctactatactctcttgacaatgaaa

SEQ ID NO: 125347 - DNA, 25 bp, Homo sapien
gacccgtcctactaggcgggcacga

SEQ ID NO: 125348 - DNA, 25 bp, Homo sapien
gacccgtcctacaaggcgggcacga

SEQ ID NO: 125349 - DNA, 25 bp, Homo sapien
accggtaacatcaggggctatcgtt

SEQ ID NO: 125350 - DNA, 25 bp, Homo sapien
accggtaacatctggggctatcgtt

SEQ ID NO: 125351 - DNA, 25 bp, Homo sapien
gcacacttaagaacgggaaacctcc

SEQ ID NO: 125352 - DNA, 25 bp, Homo sapien
gcacacttaagatcgggaaacctcc

SEQ ID NO: 125353 - DNA, 25 bp, Homo sapien
atctacagccggtcccagtggcttt

SEQ ID NO: 125354 - DNA, 25 bp, Homo sapien
atctacagccggacccagtggcttt

SEQ ID NO: 125355 - DNA, 25 bp, Homo sapien
ctctagctcgagaccccgtggaagg

SEQ ID NO: 125356 - DNA, 25 bp, Homo sapien
ctctagctcgagtccccgtggaagg

SEQ ID NO: 125357 - DNA, 25 bp, Homo sapien
ctcatccgtccgtccgttgagtagc

SEQ ID NO: 125358 - DNA, 25 bp, Homo sapien
ctcatccgtccgaccgttgagtagc

SEQ ID NO: 125359 - DNA, 25 bp, Homo sapien
gtcgaaacgactagagccggaagtc

SEQ ID NO: 125360 - DNA, 25 bp, Homo sapien
gtcgaaacgacttgagccggaagtc

SEQ ID NO: 125361 - DNA, 25 bp, Homo sapien
gggtacaaccaaacgttgtaacgtc

SEQ ID NO: 125362 - DNA, 25 bp, Homo sapien
gggtacaaccaatcgttgtaacgtc

SEQ ID NO: 125363 - DNA, 25 bp, Homo sapien
acagctgaaccaggatgtttacctt

SEQ ID NO: 125364 - DNA, 25 bp, Homo sapien
acagctgaaccacgatgtttacctt

SEQ ID NO: 125365 - DNA, 25 bp, Homo sapien
taaaaataattactaacaccaactt

SEQ ID NO: 125366 - DNA, 25 bp, Homo sapien
taaaaataattagtaacaccaactt

SEQ ID NO: 125367 - DNA, 25 bp, Homo sapien
atgaagtcattttggtactaatgtt

SEQ ID NO: 125368 - DNA, 25 bp, Homo sapien
atgaagtcatttaggtactaatgtt

SEQ ID NO: 125369 - DNA, 25 bp, Homo sapien
atgtacagtcgacatgctattgtat

SEQ ID NO: 125370 - DNA, 25 bp, Homo sapien
atgtacagtcgagatgctattgtat

SEQ ID NO: 125371 - DNA, 25 bp, Homo sapien
tcgtcggtggtgtcgcgacgtgtca

SEQ ID NO: 125372 - DNA, 25 bp, Homo sapien
tcgtcggtggtgacgcgacgtgtca

SEQ ID NO: 125373 - DNA, 25 bp, Homo sapien
cctgttgtctccagtcgacgtctcc

SEQ ID NO: 125374 - DNA, 25 bp, Homo sapien
cctgttgtctcctgtcgacgtctcc

SEQ ID NO: 125375 - DNA, 25 bp, Homo sapien
ttcagtgtcccggtcacgtcgtccg

SEQ ID NO: 125376 - DNA, 25 bp, Homo sapien
ttcagtgtcccgctcacgtcgtccg

SEQ ID NO: 125377 - DNA, 25 bp, Homo sapien
gatactttcccgtgtccttcgatct

SEQ ID NO: 125378 - DNA, 25 bp, Homo sapien
gatactttcccgagtccttcgatct

SEQ ID NO: 125379 - DNA, 25 bp, Homo sapien
tgaagtgcccgatagttttgaacgt

SEQ ID NO: 125380 - DNA, 25 bp, Homo sapien
tgaagtgcccgaaagttttgaacgt

SEQ ID NO: 125381 - DNA, 25 bp, Homo sapien
tagaagtccggtacagtccatctcc

SEQ ID NO: 125382 - DNA, 25 bp, Homo sapien
tagaagtccggttcagtccatctcc

SEQ ID NO: 125383 - DNA, 25 bp, Homo sapien
cggggtccgacaaggtcttgtgtcc

SEQ ID NO: 125384 - DNA, 25 bp, Homo sapien
cggggtccgacatggtcttgtgtcc

SEQ ID NO: 125385 - DNA, 25 bp, Homo sapien
cgtccgatgcggtgccagaccgccg

SEQ ID NO: 125386 - DNA, 25 bp, Homo sapien
cgtccgatgcggagccagaccgccg

SEQ ID NO: 125387 - DNA, 25 bp, Homo sapien
cgtcccggttcacgaggacagttac

SEQ ID NO: 125388 - DNA, 25 bp, Homo sapien
cgtcccggttcaggaggacagttac

SEQ ID NO: 125389 - DNA, 25 bp, Homo sapien
cctacggtgtgacgtggatatgtgt

SEQ ID NO: 125390 - DNA, 25 bp, Homo sapien
cctacggtgtgaggtggatatgtgt

SEQ ID NO: 125391 - DNA, 25 bp, Homo sapien
tccacttcgtctaagaccgaaagtc

SEQ ID NO: 125392 - DNA, 25 bp, Homo sapien
tccacttcgtcttagaccgaaagtc

SEQ ID NO: 125393 - DNA, 25 bp, Homo sapien
aaatttcaaagcagtcagacacatg

SEQ ID NO: 125394 - DNA, 25 bp, Homo sapien
aaatttcaaagctgtcagacacatg

SEQ ID NO: 125395 - DNA, 25 bp, Homo sapien
tacggtgacagtgtgctcagacaga

SEQ ID NO: 125396 - DNA, 25 bp, Homo sapien
tacggtgacagtctgctcagacaga

SEQ ID NO: 125397 - DNA, 25 bp, Homo sapien
ctgactgtcaaattgcggactgtac

SEQ ID NO: 125398 - DNA, 25 bp, Homo sapien
ctgactgtcaaaatgcggactgtac

SEQ ID NO: 125399 - DNA, 25 bp, Homo sapien
gtgaaaagaactactatttaccaag

SEQ ID NO: 125400 - DNA, 25 bp, Homo sapien
gtgaaaagaacttctatttaccaag

SEQ ID NO: 125401 - DNA, 25 bp, Homo sapien
tgacagaataagttattttgccact

SEQ ID NO: 125402 - DNA, 25 bp, Homo sapien
tgacagaataagatattttgccact

SEQ ID NO: 125403 - DNA, 25 bp, Homo sapien
gaagaacagaacaagttttgccact

SEQ ID NO: 125404 - DNA, 25 bp, Homo sapien
gaagaacagaactagttttgccact

SEQ ID NO: 125405 - DNA, 25 bp, Homo sapien
agtggaggtacctgtctcgggtcca

SEQ ID NO: 125406 - DNA, 25 bp, Homo sapien
agtggaggtaccagtctcgggtcca

SEQ ID NO: 125407 - DNA, 25 bp, Homo sapien
aagtgtgggaactcctatgtctcct

SEQ ID NO: 125408 - DNA, 25 bp, Homo sapien
aagtgtgggaacacctatgtctcct

SEQ ID NO: 125409 - DNA, 25 bp, Homo sapien
agacgtcggggatacccatcgaccc

SEQ ID NO: 125410 - DNA, 25 bp, Homo sapien
agacgtcggggaaacccatcgaccc

SEQ ID NO: 125411 - DNA, 25 bp, Homo sapien
tccgtctggggttttcacagtccct

SEQ ID NO: 125412 - DNA, 25 bp, Homo sapien
tccgtctggggtattcacagtccct

SEQ ID NO: 125413 - DNA, 25 bp, Homo sapien
agtgtgtgtgtgcatttgtagtcca

SEQ ID NO: 125414 - DNA, 25 bp, Homo sapien
agtgtgtgtgtggatttgtagtcca

SEQ ID NO: 125415 - DNA, 25 bp, Homo sapien
gggttgatgttgtatcactagacca

SEQ ID NO: 125416 - DNA, 25 bp, Homo sapien
gggttgatgttgaatcactagacca

SEQ ID NO: 125417 - DNA, 25 bp, Homo sapien
ctcatgacggcaggacgtataccga

SEQ ID NO: 125418 - DNA, 25 bp, Homo sapien
ctcatgacggcacgacgtataccga

SEQ ID NO: 125419 - DNA, 25 bp, Homo sapien
tctcaagggtcacgatacacgacga

SEQ ID NO: 125420 - DNA, 25 bp, Homo sapien
tctcaagggtcaggatacacgacga

SEQ ID NO: 125421 - DNA, 25 bp, Homo sapien
gactactgtcaaggacccgggaccc

SEQ ID NO: 125422 - DNA, 25 bp, Homo sapien
gactactgtcaacgacccgggaccc

SEQ ID NO: 125423 - DNA, 25 bp, Homo sapien
cgaaggacaaggtcaggtagacacc

SEQ ID NO: 125424 - DNA, 25 bp, Homo sapien
cgaaggacaaggacaggtagacacc

SEQ ID NO: 125425 - DNA, 25 bp, Homo sapien
aacgaatgaattccaaatactgaga

SEQ ID NO: 125426 - DNA, 25 bp, Homo sapien
aacgaatgaattgcaaatactgaga

SEQ ID NO: 125427 - DNA, 25 bp, Homo sapien
gtaaatgagacgttacacttacggt

SEQ ID NO: 125428 - DNA, 25 bp, Homo sapien
gtaaatgagacgatacacttacggt

SEQ ID NO: 125429 - DNA, 25 bp, Homo sapien
ttttagatagtggtacaaacccgtg

SEQ ID NO: 125430 - DNA, 25 bp, Homo sapien
ttttagatagtgctacaaacccgtg

SEQ ID NO: 125431 - DNA, 25 bp, Homo sapien
tttttactagagaccacactccgtg

SEQ ID NO: 125432 - DNA, 25 bp, Homo sapien
tttttactagagtccacactccgtg

SEQ ID NO: 125433 - DNA, 25 bp, Homo sapien
agtgtctgtggtagttttaccctcc

SEQ ID NO: 125434 - DNA, 25 bp, Homo sapien
agtgtctgtggttgttttaccctcc

SEQ ID NO: 125435 - DNA, 25 bp, Homo sapien
ggtatcaaatgttcatctttctggt

SEQ ID NO: 125436 - DNA, 25 bp, Homo sapien
ggtatcaaatgtacatctttctggt

SEQ ID NO: 125437 - DNA, 25 bp, Homo sapien
gtgacacgaaacaactctttattgg

SEQ ID NO: 125438 - DNA, 25 bp, Homo sapien
gtgacacgaaactactctttattgg

SEQ ID NO: 125439 - DNA, 25 bp, Homo sapien
atgacttttacatttcgattctggt

SEQ ID NO: 125440 - DNA, 25 bp, Homo sapien
atgacttttacaattcgattctggt

SEQ ID NO: 125441 - DNA, 25 bp, Homo sapien
gatcatccagtagaacgggttctaa

SEQ ID NO: 125442 - DNA, 25 bp, Homo sapien
gatcatccagtacaacgggttctaa

SEQ ID NO: 125443 - DNA, 25 bp, Homo sapien
catcattaaaccaaagtcgttcagg

SEQ ID NO: 125444 - DNA, 25 bp, Homo sapien
catcattaaacctaagtcgttcagg

SEQ ID NO: 125445 - DNA, 25 bp, Homo sapien
ttgacacaccgtgagttactctata

SEQ ID NO: 125446 - DNA, 25 bp, Homo sapien
ttgacacaccgtcagttactctata

SEQ ID NO: 125447 - DNA, 25 bp, Homo sapien
tcggacccgtgttacgaccgtgtaa

SEQ ID NO: 125448 - DNA, 25 bp, Homo sapien
tcggacccgtgtaacgaccgtgtaa

SEQ ID NO: 125449 - DNA, 25 bp, Homo sapien
cggacccgtgttacgaccgtgtaat

SEQ ID NO: 125450 - DNA, 25 bp, Homo sapien
cggacccgtgtttcgaccgtgtaat

SEQ ID NO: 125451 - DNA, 25 bp, Homo sapien
tcgagtcgtctgtatgtacctgtcc

SEQ ID NO: 125452 - DNA, 25 bp, Homo sapien
tcgagtcgtctgaatgtacctgtcc

SEQ ID NO: 125453 - DNA, 25 bp, Homo sapien
ctccttctactgcttgaacagggcc

SEQ ID NO: 125454 - DNA, 25 bp, Homo sapien
ctccttctactggttgaacagggcc

SEQ ID NO: 125455 - DNA, 25 bp, Homo sapien
cccgggtcgagtaagcgtacggact

SEQ ID NO: 125456 - DNA, 25 bp, Homo sapien
cccgggtcgagttagcgtacggact

SEQ ID NO: 125457 - DNA, 25 bp, Homo sapien
agtccacctgggtcttcggtcgaga

SEQ ID NO: 125458 - DNA, 25 bp, Homo sapien
agtccacctgggacttcggtcgaga

SEQ ID NO: 125459 - DNA, 25 bp, Homo sapien
tcctccaggaagacggttcgtcgag

SEQ ID NO: 125460 - DNA, 25 bp, Homo sapien
tcctccaggaagtcggttcgtcgag

SEQ ID NO: 125461 - DNA, 25 bp, Homo sapien
ccgtcctgtggtcgtccttctcggt

SEQ ID NO: 125462 - DNA, 25 bp, Homo sapien
ccgtcctgtggtggtccttctcggt

SEQ ID NO: 125463 - DNA, 25 bp, Homo sapien
aagtccttcgtaagggtgttttacg

SEQ ID NO: 125464 - DNA, 25 bp, Homo sapien
aagtccttcgtatgggtgttttacg

SEQ ID NO: 125465 - DNA, 25 bp, Homo sapien
gtctcagtatgaggagaagtctcct

SEQ ID NO: 125466 - DNA, 25 bp, Homo sapien
gtctcagtatgacgagaagtctcct

SEQ ID NO: 125467 - DNA, 25 bp, Homo sapien
ttctgggtatattgacgaagttgtt

SEQ ID NO: 125468 - DNA, 25 bp, Homo sapien
ttctgggtatatagacgaagttgtt

SEQ ID NO: 125469 - DNA, 25 bp, Homo sapien
tcgatgagactttctgatacttgtg

SEQ ID NO: 125470 - DNA, 25 bp, Homo sapien
tcgatgagacttactgatacttgtg

SEQ ID NO: 125471 - DNA, 25 bp, Homo sapien
tgtgacacgaaacaactctttattg

SEQ ID NO: 125472 - DNA, 25 bp, Homo sapien
tgtgacacgaaagaactctttattg

SEQ ID NO: 125473 - DNA, 25 bp, Homo sapien
ggaggaccaaatttcctcctacttt

SEQ ID NO: 125474 - DNA, 25 bp, Homo sapien
ggaggaccaaatatcctcctacttt

SEQ ID NO: 125475 - DNA, 25 bp, Homo sapien
ctgtcgtcatacattttcccttctt

SEQ ID NO: 125476 - DNA, 25 bp, Homo sapien
ctgtcgtcatactttttcccttctt

SEQ ID NO: 125477 - DNA, 25 bp, Homo sapien
tctgtgacaaattgtccgtttatta

SEQ ID NO: 125478 - DNA, 25 bp, Homo sapien
tctgtgacaaatagtccgtttatta

SEQ ID NO: 125479 - DNA, 25 bp, Homo sapien
caaggactgaatagtcctgtatttt

SEQ ID NO: 125480 - DNA, 25 bp, Homo sapien
caaggactgaattgtcctgtatttt

SEQ ID NO: 125481 - DNA, 25 bp, Homo sapien
gcggtggttacattgcttcattctt

SEQ ID NO: 125482 - DNA, 25 bp, Homo sapien
gcggtggttacaatgcttcattctt

SEQ ID NO: 125483 - DNA, 25 bp, Homo sapien
cgtggttcgttcgtcttaagatctt

SEQ ID NO: 125484 - DNA, 25 bp, Homo sapien
cgtggttcgttcctcttaagatctt

SEQ ID NO: 125485 - DNA, 25 bp, Homo sapien
cgacctaacgcctagttcagaagta

SEQ ID NO: 125486 - DNA, 25 bp, Homo sapien
cgacctaacgccaagttcagaagta

SEQ ID NO: 125487 - DNA, 25 bp, Homo sapien
aagttaacccccagtagacagaatc

SEQ ID NO: 125488 - DNA, 25 bp, Homo sapien
aagttaaccccctgtagacagaatc

SEQ ID NO: 125489 - DNA, 25 bp, Homo sapien
tagaagacccgtatctgaagtagaa

SEQ ID NO: 125490 - DNA, 25 bp, Homo sapien
tagaagacccgtttctgaagtagaa

SEQ ID NO: 125491 - DNA, 25 bp, Homo sapien
gacaacacacggtccttgacacaat

SEQ ID NO: 125492 - DNA, 25 bp, Homo sapien
gacaacacacggaccttgacacaat

SEQ ID NO: 125493 - DNA, 25 bp, Homo sapien
gacgagaccgggagcaagacgacaa

SEQ ID NO: 125494 - DNA, 25 bp, Homo sapien
gacgagaccgggtgcaagacgacaa

SEQ ID NO: 125495 - DNA, 25 bp, Homo sapien
agagagggttgtacaagtcgaccag

SEQ ID NO: 125496 - DNA, 25 bp, Homo sapien
agagagggttgttcaagtcgaccag

SEQ ID NO: 125497 - DNA, 25 bp, Homo sapien
ggggtaggagggtgcagacctccca

SEQ ID NO: 125498 - DNA, 25 bp, Homo sapien
ggggtaggagggagcagacctccca

SEQ ID NO: 125499 - DNA, 25 bp, Homo sapien
gaggacgcccgacagtatctccctg

SEQ ID NO: 125500 - DNA, 25 bp, Homo sapien
gaggacgcccgagagtatctccctg

SEQ ID NO: 125501 - DNA, 25 bp, Homo sapien
acgacggtaggagagacccctgtcg

SEQ ID NO: 125502 - DNA, 25 bp, Homo sapien
acgacggtaggacagacccctgtcg

SEQ ID NO: 125503 - DNA, 25 bp, Homo sapien
cggggactctatctgtaccctgtcg

SEQ ID NO: 125504 - DNA, 25 bp, Homo sapien
cggggactctatgtgtaccctgtcg

SEQ ID NO: 125505 - DNA, 25 bp, Homo sapien
cccggagacgggaccgtcctttacg

SEQ ID NO: 125506 - DNA, 25 bp, Homo sapien
cccggagacgggtccgtcctttacg

SEQ ID NO: 125507 - DNA, 25 bp, Homo sapien
ggtctcggagggaccgtcccgtcct

SEQ ID NO: 125508 - DNA, 25 bp, Homo sapien
ggtctcggagggtccgtcccgtcct

SEQ ID NO: 125509 - DNA, 25 bp, Homo sapien
tcgtggtaagcgtggactgttatac

SEQ ID NO: 125510 - DNA, 25 bp, Homo sapien
tcgtggtaagcgaggactgttatac

SEQ ID NO: 125511 - DNA, 25 bp, Homo sapien
ttcgacgcgtttgtaagacatttgt

SEQ ID NO: 125512 - DNA, 25 bp, Homo sapien
ttcgacgcgtttctaagacatttgt

SEQ ID NO: 125513 - DNA, 25 bp, Homo sapien
tgtttacgactctacctgaaagaac

SEQ ID NO: 125514 - DNA, 25 bp, Homo sapien
tgtttacgactcaacctgaaagaac

SEQ ID NO: 125515 - DNA, 25 bp, Homo sapien
acgccactgtcgtccgaagagaagt

SEQ ID NO: 125516 - DNA, 25 bp, Homo sapien
acgccactgtcgaccgaagagaagt

SEQ ID NO: 125517 - DNA, 25 bp, Homo sapien
tacgcgctcctgtagcgcagagaat

SEQ ID NO: 125518 - DNA, 25 bp, Homo sapien
tacgcgctcctgaagcgcagagaat

SEQ ID NO: 125519 - DNA, 25 bp, Homo sapien
ggtggacccccaagacgtcagaaac

SEQ ID NO: 125520 - DNA, 25 bp, Homo sapien
ggtggacccccatgacgtcagaaac

SEQ ID NO: 125521 - DNA, 25 bp, Homo sapien
agaggcacggagtcggaaatcaact

SEQ ID NO: 125522 - DNA, 25 bp, Homo sapien
agaggcacggagacggaaatcaact

SEQ ID NO: 125523 - DNA, 25 bp, Homo sapien
gggtcgagtgacacggaacctccgc

SEQ ID NO: 125524 - DNA, 25 bp, Homo sapien
gggtcgagtgactcggaacctccgc

SEQ ID NO: 125525 - DNA, 25 bp, Homo sapien
ggaagacccctttgaagtctacatc

SEQ ID NO: 125526 - DNA, 25 bp, Homo sapien
ggaagaccccttagaagtctacatc

SEQ ID NO: 125527 - DNA, 25 bp, Homo sapien
aacgaacccttacactaaaacgagg

SEQ ID NO: 125528 - DNA, 25 bp, Homo sapien
aacgaacccttagactaaaacgagg

SEQ ID NO: 125529 - DNA, 25 bp, Homo sapien
tagtatctgtgttttcccagtaagg

SEQ ID NO: 125530 - DNA, 25 bp, Homo sapien
tagtatctgtgtattcccagtaagg

SEQ ID NO: 125531 - DNA, 25 bp, Homo sapien
gtagatcgcacatttccacaaacgg

SEQ ID NO: 125532 - DNA, 25 bp, Homo sapien
gtagatcgcacaattccacaaacgg

SEQ ID NO: 125533 - DNA, 25 bp, Homo sapien
tagatggaaaactgaactgaaccgt

SEQ ID NO: 125534 - DNA, 25 bp, Homo sapien
tagatggaaaacagaactgaaccgt

SEQ ID NO: 125535 - DNA, 25 bp, Homo sapien
cattttattgagttataccgaaccg

SEQ ID NO: 125536 - DNA, 25 bp, Homo sapien
cattttattgagatataccgaaccg

SEQ ID NO: 125537 - DNA, 25 bp, Homo sapien
attacgacaaggtacgtctccattg

SEQ ID NO: 125538 - DNA, 25 bp, Homo sapien
attacgacaaggaacgtctccattg

SEQ ID NO: 125539 - DNA, 25 bp, Homo sapien
actttgaacggtaatcactccgtaa

SEQ ID NO: 125540 - DNA, 25 bp, Homo sapien
actttgaacggttatcactccgtaa

SEQ ID NO: 125541 - DNA, 25 bp, Homo sapien
gatttatgactaaggtatcacccca

SEQ ID NO: 125542 - DNA, 25 bp, Homo sapien
gatttatgactatggtatcacccca

SEQ ID NO: 125543 - DNA, 25 bp, Homo sapien
cttatctatgtgacgacgcctactt

SEQ ID NO: 125544 - DNA, 25 bp, Homo sapien
cttatctatgtgtcgacgcctactt

SEQ ID NO: 125545 - DNA, 25 bp, Homo sapien
tctcagtctgctgtcgacctcgtaa

SEQ ID NO: 125546 - DNA, 25 bp, Homo sapien
tctcagtctgctctcgacctcgtaa

SEQ ID NO: 125547 - DNA, 25 bp, Homo sapien
cccacgagactgctggcttccgtga

SEQ ID NO: 125548 - DNA, 25 bp, Homo sapien
cccacgagactggtggcttccgtga

SEQ ID NO: 125549 - DNA, 25 bp, Homo sapien
acctactggatggaggttccataat

SEQ ID NO: 125550 - DNA, 25 bp, Homo sapien
acctactggatgcaggttccataat

SEQ ID NO: 125551 - DNA, 25 bp, Homo sapien
ttcttagaggcaggtaacaaacgtc

SEQ ID NO: 125552 - DNA, 25 bp, Homo sapien
ttcttagaggcacgtaacaaacgtc

SEQ ID NO: 125553 - DNA, 25 bp, Homo sapien
gactgtagctacaggacagaaaccg

SEQ ID NO: 125554 - DNA, 25 bp, Homo sapien
gactgtagctactggacagaaaccg

SEQ ID NO: 125555 - DNA, 25 bp, Homo sapien
gagattgtggaccatcacgagaaag

SEQ ID NO: 125556 - DNA, 25 bp, Homo sapien
gagattgtggacgatcacgagaaag

SEQ ID NO: 125557 - DNA, 25 bp, Homo sapien
acgtgttggtggaccaacaacaggg

SEQ ID NO: 125558 - DNA, 25 bp, Homo sapien
acgtgttggtggtccaacaacaggg

SEQ ID NO: 125559 - DNA, 25 bp, Homo sapien
tatacatatgcctccgacatgtcgc

SEQ ID NO: 125560 - DNA, 25 bp, Homo sapien
tatacatatgccaccgacatgtcgc

SEQ ID NO: 125561 - DNA, 25 bp, Homo sapien
aatttatgacacagacaatgacgcc

SEQ ID NO: 125562 - DNA, 25 bp, Homo sapien
aatttatgacactgacaatgacgcc

SEQ ID NO: 125563 - DNA, 25 bp, Homo sapien
ggcttattttactacataaagtcat

SEQ ID NO: 125564 - DNA, 25 bp, Homo sapien
ggcttattttacaacataaagtcat

SEQ ID NO: 125565 - DNA, 25 bp, Homo sapien
tcactgtgtttcaatgtaaattccg

SEQ ID NO: 125566 - DNA, 25 bp, Homo sapien
tcactgtgtttctatgtaaattccg

SEQ ID NO: 125567 - DNA, 25 bp, Homo sapien
gtcactgggttttctgagaaggtcc

SEQ ID NO: 125568 - DNA, 25 bp, Homo sapien
gtcactgggtttactgagaaggtcc

SEQ ID NO: 125569 - DNA, 25 bp, Homo sapien
cccctggaactccagacaacggagg

SEQ ID NO: 125570 - DNA, 25 bp, Homo sapien
cccctggaactcgagacaacggagg

SEQ ID NO: 125571 - DNA, 25 bp, Homo sapien
tctacctcacctcaccacaagaggg

SEQ ID NO: 125572 - DNA, 25 bp, Homo sapien
tctacctcacctgaccacaagaggg

SEQ ID NO: 125573 - DNA, 25 bp, Homo sapien
ttccactgcctcatctacggcaaga

SEQ ID NO: 125574 - DNA, 25 bp, Homo sapien
ttccactgcctcttctacggcaaga

SEQ ID NO: 125575 - DNA, 25 bp, Homo sapien
cctgtcacgttgttacgaaacacag

SEQ ID NO: 125576 - DNA, 25 bp, Homo sapien
cctgtcacgttgatacgaaacacag

SEQ ID NO: 125577 - DNA, 25 bp, Homo sapien
tagatttagtaccaagactacgtac

SEQ ID NO: 125578 - DNA, 25 bp, Homo sapien
tagatttagtacgaagactacgtac

SEQ ID NO: 125579 - DNA, 25 bp, Homo sapien
ccactgtagtagttcgacctactcg

SEQ ID NO: 125580 - DNA, 25 bp, Homo sapien
ccactgtagtagatcgacctactcg

SEQ ID NO: 125581 - DNA, 25 bp, Homo sapien
tcatcagtccacgtgtacccaatgt

SEQ ID NO: 125582 - DNA, 25 bp, Homo sapien
tcatcagtccacctgtacccaatgt

SEQ ID NO: 125583 - DNA, 25 bp, Homo sapien
aatcccggacccaagacctcgaagg

SEQ ID NO: 125584 - DNA, 25 bp, Homo sapien
aatcccggaccctagacctcgaagg

SEQ ID NO: 125585 - DNA, 25 bp, Homo sapien
cgacgtgtcccgacgacaggagtca

SEQ ID NO: 125586 - DNA, 25 bp, Homo sapien
cgacgtgtcccgtcgacaggagtca

SEQ ID NO: 125587 - DNA, 25 bp, Homo sapien
tcgtcgtctcccacgaccgaggtga

SEQ ID NO: 125588 - DNA, 25 bp, Homo sapien
tcgtcgtctccctcgaccgaggtga

SEQ ID NO: 125589 - DNA, 25 bp, Homo sapien
ttcgttcctacgtcctaacatgtag

SEQ ID NO: 125590 - DNA, 25 bp, Homo sapien
ttcgttcctacgacctaacatgtag

SEQ ID NO: 125591 - DNA, 25 bp, Homo sapien
ttcgtggaccgtcgacgtaaagggt

SEQ ID NO: 125592 - DNA, 25 bp, Homo sapien
ttcgtggaccgtggacgtaaagggt

SEQ ID NO: 125593 - DNA, 25 bp, Homo sapien
gagtcagcagtcgacagaacgcgtg

SEQ ID NO: 125594 - DNA, 25 bp, Homo sapien
gagtcagcagtccacagaacgcgtg

SEQ ID NO: 125595 - DNA, 25 bp, Homo sapien
caggaacccagtgactagactccgt

SEQ ID NO: 125596 - DNA, 25 bp, Homo sapien
caggaacccagtcactagactccgt

SEQ ID NO: 125597 - DNA, 25 bp, Homo sapien
gaacgtcacaacgcagaccaagtca

SEQ ID NO: 125598 - DNA, 25 bp, Homo sapien
gaacgtcacaacccagaccaagtca

SEQ ID NO: 125599 - DNA, 25 bp, Homo sapien
tcgttccgccggagtgtctgtgacg

SEQ ID NO: 125600 - DNA, 25 bp, Homo sapien
tcgttccgccggtgtgtctgtgacg

SEQ ID NO: 125601 - DNA, 25 bp, Homo sapien
acttctaccaggtagagacatcgtc

SEQ ID NO: 125602 - DNA, 25 bp, Homo sapien
acttctaccaggaagagacatcgtc

SEQ ID NO: 125603 - DNA, 25 bp, Homo sapien
ctggttacaggttcactgaatatcc

SEQ ID NO: 125604 - DNA, 25 bp, Homo sapien
ctggttacaggtacactgaatatcc

SEQ ID NO: 125605 - DNA, 25 bp, Homo sapien
tcctattttgggaacacaagtaccc

SEQ ID NO: 125606 - DNA, 25 bp, Homo sapien
tcctattttgggtacacaagtaccc

SEQ ID NO: 125607 - DNA, 25 bp, Homo sapien
aacttactttggtagaaacgtcacc

SEQ ID NO: 125608 - DNA, 25 bp, Homo sapien
aacttactttggaagaaacgtcacc

SEQ ID NO: 125609 - DNA, 25 bp, Homo sapien
gcttataggcggttgagattcagcg

SEQ ID NO: 125610 - DNA, 25 bp, Homo sapien
gcttataggcggatgagattcagcg

SEQ ID NO: 125611 - DNA, 25 bp, Homo sapien
gaaagtactttggatcctatttaca

SEQ ID NO: 125612 - DNA, 25 bp, Homo sapien
gaaagtactttgcatcctatttaca

SEQ ID NO: 125613 - DNA, 25 bp, Homo sapien
aggaaatgttttaccccggcgtata

SEQ ID NO: 125614 - DNA, 25 bp, Homo sapien
aggaaatgtttttccccggcgtata

SEQ ID NO: 125615 - DNA, 25 bp, Homo sapien
aagaaaccttttgttcgggacacct

SEQ ID NO: 125616 - DNA, 25 bp, Homo sapien
aagaaaccttttcttcgggacacct

SEQ ID NO: 125617 - DNA, 25 bp, Homo sapien
gtcatggttttagtggtcggcttac

SEQ ID NO: 125618 - DNA, 25 bp, Homo sapien
gtcatggttttactggtcggcttac

SEQ ID NO: 125619 - DNA, 25 bp, Homo sapien
gtctgttacgtcatgagtcgggaac

SEQ ID NO: 125620 - DNA, 25 bp, Homo sapien
gtctgttacgtcttgagtcgggaac

SEQ ID NO: 125621 - DNA, 25 bp, Homo sapien
cggttcctcctcagtatagactagg

SEQ ID NO: 125622 - DNA, 25 bp, Homo sapien
cggttcctcctctgtatagactagg

SEQ ID NO: 125623 - DNA, 25 bp, Homo sapien
tctcttcgtcgacgagtagtcttgt

SEQ ID NO: 125624 - DNA, 25 bp, Homo sapien
tctcttcgtcgaggagtagtcttgt

SEQ ID NO: 125625 - DNA, 25 bp, Homo sapien
agttcagtagtcacgttgtgacgta

SEQ ID NO: 125626 - DNA, 25 bp, Homo sapien
agttcagtagtctcgttgtgacgta

SEQ ID NO: 125627 - DNA, 25 bp, Homo sapien
atgacgtcggctaactgactgagta

SEQ ID NO: 125628 - DNA, 25 bp, Homo sapien
atgacgtcggcttactgactgagta

SEQ ID NO: 125629 - DNA, 25 bp, Homo sapien
ctttgaaatgactgatgtctcccga

SEQ ID NO: 125630 - DNA, 25 bp, Homo sapien
ctttgaaatgacagatgtctcccga

SEQ ID NO: 125631 - DNA, 25 bp, Homo sapien
tactggaacttcacaacttgcagta

SEQ ID NO: 125632 - DNA, 25 bp, Homo sapien
tactggaacttctcaacttgcagta

SEQ ID NO: 125633 - DNA, 25 bp, Homo sapien
cgttgggtgtttctgtcttgactaa

SEQ ID NO: 125634 - DNA, 25 bp, Homo sapien
cgttgggtgtttgtgtcttgactaa

SEQ ID NO: 125635 - DNA, 25 bp, Homo sapien
ggttggttaaaaatctctctcctta

SEQ ID NO: 125636 - DNA, 25 bp, Homo sapien
ggttggttaaaattctctctcctta

SEQ ID NO: 125637 - DNA, 25 bp, Homo sapien
actgagtctcagtactgttccccca

SEQ ID NO: 125638 - DNA, 25 bp, Homo sapien
actgagtctcagaactgttccccca

SEQ ID NO: 125639 - DNA, 25 bp, Homo sapien
actgagtgccgaaaaacccctgtat

SEQ ID NO: 125640 - DNA, 25 bp, Homo sapien
actgagtgccgataaacccctgtat

SEQ ID NO: 125641 - DNA, 25 bp, Homo sapien
gatagtctcttacacgaaacttgac

SEQ ID NO: 125642 - DNA, 25 bp, Homo sapien
gatagtctcttagacgaaacttgac

SEQ ID NO: 125643 - DNA, 25 bp, Homo sapien
tgagagaccttccatggactcgagg

SEQ ID NO: 125644 - DNA, 25 bp, Homo sapien
tgagagaccttcgatggactcgagg

SEQ ID NO: 125645 - DNA, 25 bp, Homo sapien
aggactgactctctcctggccggcg

SEQ ID NO: 125646 - DNA, 25 bp, Homo sapien
aggactgactctgtcctggccggcg

SEQ ID NO: 125647 - DNA, 25 bp, Homo sapien
taacttaccccgaagatcctcggtc

SEQ ID NO: 125648 - DNA, 25 bp, Homo sapien
taacttaccccgtagatcctcggtc

SEQ ID NO: 125649 - DNA, 25 bp, Homo sapien
caacaaacctttgaaccttgtgtgt

SEQ ID NO: 125650 - DNA, 25 bp, Homo sapien
caacaaacctttcaaccttgtgtgt

SEQ ID NO: 125651 - DNA, 25 bp, Homo sapien
aagaaaacatgttctcacgtcttga

SEQ ID NO: 125652 - DNA, 25 bp, Homo sapien
aagaaaacatgtactcacgtcttga

SEQ ID NO: 125653 - DNA, 25 bp, Homo sapien
acaatatcctttggagtgtcagtgt

SEQ ID NO: 125654 - DNA, 25 bp, Homo sapien
acaatatcctttcgagtgtcagtgt

SEQ ID NO: 125655 - DNA, 25 bp, Homo sapien
acctttgtcacagaacaggtcacga

SEQ ID NO: 125656 - DNA, 25 bp, Homo sapien
acctttgtcacacaacaggtcacga

SEQ ID NO: 125657 - DNA, 25 bp, Homo sapien
gtttgtggacacaacgagtacagtc

SEQ ID NO: 125658 - DNA, 25 bp, Homo sapien
gtttgtggacactacgagtacagtc

SEQ ID NO: 125659 - DNA, 25 bp, Homo sapien
ggacccgtggaaacttcgacgaccg

SEQ ID NO: 125660 - DNA, 25 bp, Homo sapien
ggacccgtggaatcttcgacgaccg

SEQ ID NO: 125661 - DNA, 25 bp, Homo sapien
ccggaaatcgggttcagtgtgagtc

SEQ ID NO: 125662 - DNA, 25 bp, Homo sapien
ccggaaatcgggatcagtgtgagtc

SEQ ID NO: 125663 - DNA, 25 bp, Homo sapien
cgtcctaaagggtgtgtacgggtac

SEQ ID NO: 125664 - DNA, 25 bp, Homo sapien
cgtcctaaagggagtgtacgggtac

SEQ ID NO: 125665 - DNA, 25 bp, Homo sapien
ctccataggtgacgtgcacgcggcg

SEQ ID NO: 125666 - DNA, 25 bp, Homo sapien
ctccataggtgaggtgcacgcggcg

SEQ ID NO: 125667 - DNA, 25 bp, Homo sapien
gtgagtgggtcgagacccgtctcgt

SEQ ID NO: 125668 - DNA, 25 bp, Homo sapien
gtgagtgggtcgtgacccgtctcgt

SEQ ID NO: 125669 - DNA, 25 bp, Homo sapien
cgacccgtggtcgtaccctgagtct

SEQ ID NO: 125670 - DNA, 25 bp, Homo sapien
cgacccgtggtcctaccctgagtct

SEQ ID NO: 125671 - DNA, 25 bp, Homo sapien
ttaacctctgcgacagcctcgtagg

SEQ ID NO: 125672 - DNA, 25 bp, Homo sapien
ttaacctctgcgtcagcctcgtagg

SEQ ID NO: 125673 - DNA, 25 bp, Homo sapien
aagtaccccgtctacggtgccagta

SEQ ID NO: 125674 - DNA, 25 bp, Homo sapien
aagtaccccgtcaacggtgccagta

SEQ ID NO: 125675 - DNA, 25 bp, Homo sapien
cggaccgcctgtaagggtgtgtcac

SEQ ID NO: 125676 - DNA, 25 bp, Homo sapien
cggaccgcctgttagggtgtgtcac

SEQ ID NO: 125677 - DNA, 25 bp, Homo sapien
tgtctctttccctttggttgtagaa

SEQ ID NO: 125678 - DNA, 25 bp, Homo sapien
tgtctctttcccattggttgtagaa

SEQ ID NO: 125679 - DNA, 25 bp, Homo sapien
accaccgaactcattgtcaatgaag

SEQ ID NO: 125680 - DNA, 25 bp, Homo sapien
accaccgaactctttgtcaatgaag

SEQ ID NO: 125681 - DNA, 25 bp, Homo sapien
aacctgacttggttcaagtgtacag

SEQ ID NO: 125682 - DNA, 25 bp, Homo sapien
aacctgacttggatcaagtgtacag

SEQ ID NO: 125683 - DNA, 25 bp, Homo sapien
aggtgacctcggattctgtctacag

SEQ ID NO: 125684 - DNA, 25 bp, Homo sapien
aggtgacctcggtttctgtctacag

SEQ ID NO: 125685 - DNA, 25 bp, Homo sapien
gagtgtcgagggttcccgtagaaca

SEQ ID NO: 125686 - DNA, 25 bp, Homo sapien
gagtgtcgagggatcccgtagaaca

SEQ ID NO: 125687 - DNA, 25 bp, Homo sapien
agagaagtaccgaaaacctgtcaat

SEQ ID NO: 125688 - DNA, 25 bp, Homo sapien
agagaagtaccgtaaacctgtcaat

SEQ ID NO: 125689 - DNA, 25 bp, Homo sapien
gacgatgtttgtaagtacctaccca

SEQ ID NO: 125690 - DNA, 25 bp, Homo sapien
gacgatgtttgttagtacctaccca

SEQ ID NO: 125691 - DNA, 25 bp, Homo sapien
ataacatgttgtgtacgtccattca

SEQ ID NO: 125692 - DNA, 25 bp, Homo sapien
ataacatgttgtctacgtccattca

SEQ ID NO: 125693 - DNA, 25 bp, Homo sapien
tcaaatctgttttgacgacctttaa

SEQ ID NO: 125694 - DNA, 25 bp, Homo sapien
tcaaatctgtttagacgacctttaa

SEQ ID NO: 125695 - DNA, 25 bp, Homo sapien
cggaaaaagtttagactctttagac

SEQ ID NO: 125696 - DNA, 25 bp, Homo sapien
cggaaaaagttttgactctttagac

SEQ ID NO: 125697 - DNA, 25 bp, Homo sapien
aaagaatttacgaacaacgtgagtc

SEQ ID NO: 125698 - DNA, 25 bp, Homo sapien
aaagaatttacgtacaacgtgagtc

SEQ ID NO: 125699 - DNA, 25 bp, Homo sapien
caccaaaacgtgttcggtaaagata

SEQ ID NO: 125700 - DNA, 25 bp, Homo sapien
caccaaaacgtgatcggtaaagata

SEQ ID NO: 125701 - DNA, 25 bp, Homo sapien
ctacgatgaatcgataccaaaagat

SEQ ID NO: 125702 - DNA, 25 bp, Homo sapien
ctacgatgaatccataccaaaagat

SEQ ID NO: 125703 - DNA, 25 bp, Homo sapien
gttttaaaaccgaaccctctgagat

SEQ ID NO: 125704 - DNA, 25 bp, Homo sapien
gttttaaaaccgtaccctctgagat

SEQ ID NO: 125705 - DNA, 25 bp, Homo sapien
aagattaatgagtataccctttgac

SEQ ID NO: 125706 - DNA, 25 bp, Homo sapien
aagattaatgagaataccctttgac

SEQ ID NO: 125707 - DNA, 25 bp, Homo sapien
ttttagtctagaaccactactggaa

SEQ ID NO: 125708 - DNA, 25 bp, Homo sapien
ttttagtctagatccactactggaa

SEQ ID NO: 125709 - DNA, 25 bp, Homo sapien
gtagttccacagtcacttgtggtca

SEQ ID NO: 125710 - DNA, 25 bp, Homo sapien
gtagttccacagacacttgtggtca

SEQ ID NO: 125711 - DNA, 25 bp, Homo sapien
ggtgtcctatagtactacttcccaa

SEQ ID NO: 125712 - DNA, 25 bp, Homo sapien
ggtgtcctatagaactacttcccaa

SEQ ID NO: 125713 - DNA, 25 bp, Homo sapien
gggtttacattaaataactatttta

SEQ ID NO: 125714 - DNA, 25 bp, Homo sapien
gggtttacattatataactatttta

SEQ ID NO: 125715 - DNA, 25 bp, Homo sapien
tgtcaaattacctccttcgtagaag

SEQ ID NO: 125716 - DNA, 25 bp, Homo sapien
tgtcaaattaccaccttcgtagaag

SEQ ID NO: 125717 - DNA, 25 bp, Homo sapien
tctccaggtctcgtccccgtagggt

SEQ ID NO: 125718 - DNA, 25 bp, Homo sapien
tctccaggtctcctccccgtagggt

SEQ ID NO: 125719 - DNA, 25 bp, Homo sapien
tcgttaatgtgttcccccataacgg

SEQ ID NO: 125720 - DNA, 25 bp, Homo sapien
tcgttaatgtgtacccccataacgg

SEQ ID NO: 125721 - DNA, 25 bp, Homo sapien
agtctaaatgttgtatttcatgacc

SEQ ID NO: 125722 - DNA, 25 bp, Homo sapien
agtctaaatgttctatttcatgacc

SEQ ID NO: 125723 - DNA, 25 bp, Homo sapien
atatgtgttgtgtcgtcgatgtacc

SEQ ID NO: 125724 - DNA, 25 bp, Homo sapien
atatgtgttgtgacgtcgatgtacc

SEQ ID NO: 125725 - DNA, 25 bp, Homo sapien
tccacttttcagtgtagttttctac

SEQ ID NO: 125726 - DNA, 25 bp, Homo sapien
tccacttttcagagtagttttctac

SEQ ID NO: 125727 - DNA, 25 bp, Homo sapien
ctcatgtacgacttgtcctttgtct

SEQ ID NO: 125728 - DNA, 25 bp, Homo sapien
ctcatgtacgacatgtcctttgtct

SEQ ID NO: 125729 - DNA, 25 bp, Homo sapien
cgtacatttcgttgtatttctcggt

SEQ ID NO: 125730 - DNA, 25 bp, Homo sapien
cgtacatttcgtagtatttctcggt

SEQ ID NO: 125731 - DNA, 25 bp, Homo sapien
tagaagattaacaattacgttcgac

SEQ ID NO: 125732 - DNA, 25 bp, Homo sapien
tagaagattaactattacgttcgac

SEQ ID NO: 125733 - DNA, 25 bp, Homo sapien
ttctgagctcagatataagtttcta

SEQ ID NO: 125734 - DNA, 25 bp, Homo sapien
ttctgagctcagttataagtttcta

SEQ ID NO: 125735 - DNA, 25 bp, Homo sapien
ttgtactacccgtcttagaagcgac

SEQ ID NO: 125736 - DNA, 25 bp, Homo sapien
ttgtactacccgacttagaagcgac

SEQ ID NO: 125737 - DNA, 25 bp, Homo sapien
tttgacgtgggtaagactggtacgt

SEQ ID NO: 125738 - DNA, 25 bp, Homo sapien
tttgacgtgggttagactggtacgt

SEQ ID NO: 125739 - DNA, 25 bp, Homo sapien
gactgtcggaggaacgactcggtct

SEQ ID NO: 125740 - DNA, 25 bp, Homo sapien
gactgtcggaggtacgactcggtct

SEQ ID NO: 125741 - DNA, 25 bp, Homo sapien
ccacgtagtgtgaccgtggatttct

SEQ ID NO: 125742 - DNA, 25 bp, Homo sapien
ccacgtagtgtgtccgtggatttct

SEQ ID NO: 125743 - DNA, 25 bp, Homo sapien
cctcgttggacgagtctatgtagtt

SEQ ID NO: 125744 - DNA, 25 bp, Homo sapien
cctcgttggacgtgtctatgtagtt

SEQ ID NO: 125745 - DNA, 25 bp, Homo sapien
acccagacgtgtacggaaagtttgt

SEQ ID NO: 125746 - DNA, 25 bp, Homo sapien
acccagacgtgttcggaaagtttgt

SEQ ID NO: 125747 - DNA, 25 bp, Homo sapien
tctaaaggtataccataacgtttgt

SEQ ID NO: 125748 - DNA, 25 bp, Homo sapien
tctaaaggtatagcataacgtttgt

SEQ ID NO: 125749 - DNA, 25 bp, Homo sapien
gttccgtttgatacggaagttctag

SEQ ID NO: 125750 - DNA, 25 bp, Homo sapien
gttccgtttgattcggaagttctag

SEQ ID NO: 125751 - DNA, 25 bp, Homo sapien
ttttttggtactctacacgtattaa

SEQ ID NO: 125752 - DNA, 25 bp, Homo sapien
ttttttggtactgtacacgtattaa

SEQ ID NO: 125753 - DNA, 25 bp, Homo sapien
tctctgacactcatcactgtgtaag

SEQ ID NO: 125754 - DNA, 25 bp, Homo sapien
tctctgacactcttcactgtgtaag

SEQ ID NO: 125755 - DNA, 25 bp, Homo sapien
cttatgtatccctcgatacgttgtg

SEQ ID NO: 125756 - DNA, 25 bp, Homo sapien
cttatgtatcccacgatacgttgtg

SEQ ID NO: 125757 - DNA, 25 bp, Homo sapien
gtttaactgtcatctaaacgatttg

SEQ ID NO: 125758 - DNA, 25 bp, Homo sapien
gtttaactgtcaactaaacgatttg

SEQ ID NO: 125759 - DNA, 25 bp, Homo sapien
ctttggaccgtcacttaagattgat

SEQ ID NO: 125760 - DNA, 25 bp, Homo sapien
ctttggaccgtctcttaagattgat

SEQ ID NO: 125761 - DNA, 25 bp, Homo sapien
tgtccttggtcatgggcgatgtgta

SEQ ID NO: 125762 - DNA, 25 bp, Homo sapien
tgtccttggtcaagggcgatgtgta

SEQ ID NO: 125763 - DNA, 25 bp, Homo sapien
gtacctggtccacgcgcggaaggtc

SEQ ID NO: 125764 - DNA, 25 bp, Homo sapien
gtacctggtccaggcgcggaaggtc

SEQ ID NO: 125765 - DNA, 25 bp, Homo sapien
ccctggtaccgaaatccaacgtatc

SEQ ID NO: 125766 - DNA, 25 bp, Homo sapien
ccctggtaccgatatccaacgtatc

SEQ ID NO: 125767 - DNA, 25 bp, Homo sapien
ccctcgttcacagatattcctctct

SEQ ID NO: 125768 - DNA, 25 bp, Homo sapien
ccctcgttcacacatattcctctct

SEQ ID NO: 125769 - DNA, 25 bp, Homo sapien
taaagtctaaaggagtttcgacccg

SEQ ID NO: 125770 - DNA, 25 bp, Homo sapien
taaagtctaaagcagtttcgacccg

SEQ ID NO: 125771 - DNA, 25 bp, Homo sapien
atacacaaaatgagttgtctcatgt

SEQ ID NO: 125772 - DNA, 25 bp, Homo sapien
atacacaaaatgtgttgtctcatgt

SEQ ID NO: 125773 - DNA, 25 bp, Homo sapien
taccatcacctcgtcgctgtgtgaa

SEQ ID NO: 125774 - DNA, 25 bp, Homo sapien
taccatcacctcctcgctgtgtgaa

SEQ ID NO: 125775 - DNA, 25 bp, Homo sapien
gtcttgcaccaccagcagtgtggta

SEQ ID NO: 125776 - DNA, 25 bp, Homo sapien
gtcttgcaccacgagcagtgtggta

SEQ ID NO: 125777 - DNA, 25 bp, Homo sapien
aaggtgcgtcctgtagtcaacgaaa

SEQ ID NO: 125778 - DNA, 25 bp, Homo sapien
aaggtgcgtcctctagtcaacgaaa

SEQ ID NO: 125779 - DNA, 25 bp, Homo sapien
aaggtcgtgacctcgattaagtaaa

SEQ ID NO: 125780 - DNA, 25 bp, Homo sapien
aaggtcgtgaccacgattaagtaaa

SEQ ID NO: 125781 - DNA, 25 bp, Homo sapien
aagagtttgccgacgtgagtctaca

SEQ ID NO: 125782 - DNA, 25 bp, Homo sapien
aagagtttgccgtcgtgagtctaca

SEQ ID NO: 125783 - DNA, 25 bp, Homo sapien
actagtgtagtgtaccactggtcca

SEQ ID NO: 125784 - DNA, 25 bp, Homo sapien
actagtgtagtgaaccactggtcca

SEQ ID NO: 125785 - DNA, 25 bp, Homo sapien
aaacatcgtcgatccgggacggtgg

SEQ ID NO: 125786 - DNA, 25 bp, Homo sapien
aaacatcgtcgaaccgggacggtgg

SEQ ID NO: 125787 - DNA, 25 bp, Homo sapien
aaagaccccgcccgggaccgcgacg

SEQ ID NO: 125788 - DNA, 25 bp, Homo sapien
aaagaccccgccggggaccgcgacg

SEQ ID NO: 125789 - DNA, 25 bp, Homo sapien
ataatattccggatgagaatccgtc

SEQ ID NO: 125790 - DNA, 25 bp, Homo sapien
ataatattccggttgagaatccgtc

SEQ ID NO: 125791 - DNA, 25 bp, Homo sapien
acctcgacggtagtgtacggttcgg

SEQ ID NO: 125792 - DNA, 25 bp, Homo sapien
acctcgacggtactgtacggttcgg

SEQ ID NO: 125793 - DNA, 25 bp, Homo sapien
ggaaagaccggaaatcccctcagag

SEQ ID NO: 125794 - DNA, 25 bp, Homo sapien
ggaaagaccggatatcccctcagag

SEQ ID NO: 125795 - DNA, 25 bp, Homo sapien
ttaaagactcggtggagaaccttca

SEQ ID NO: 125796 - DNA, 25 bp, Homo sapien
ttaaagactcggaggagaaccttca

SEQ ID NO: 125797 - DNA, 25 bp, Homo sapien
taagaatcccaatgagtgattccac

SEQ ID NO: 125798 - DNA, 25 bp, Homo sapien
taagaatcccaaagagtgattccac

SEQ ID NO: 125799 - DNA, 25 bp, Homo sapien
ttgaaaaggagaaatctacctctga

SEQ ID NO: 125800 - DNA, 25 bp, Homo sapien
ttgaaaaggagatatctacctctga

SEQ ID NO: 125801 - DNA, 25 bp, Homo sapien
caggaacgggagacaccggtccgac

SEQ ID NO: 125802 - DNA, 25 bp, Homo sapien
caggaacgggagtcaccggtccgac

SEQ ID NO: 125803 - DNA, 25 bp, Homo sapien
gagacacagggaagtcacccttcgg

SEQ ID NO: 125804 - DNA, 25 bp, Homo sapien
gagacacagggatgtcacccttcgg

SEQ ID NO: 125805 - DNA, 25 bp, Homo sapien
aagacaggaacaggtgcccggacgt

SEQ ID NO: 125806 - DNA, 25 bp, Homo sapien
aagacaggaacacgtgcccggacgt

SEQ ID NO: 125807 - DNA, 25 bp, Homo sapien
acagcgacggcatcttcgacctggc

SEQ ID NO: 125808 - DNA, 25 bp, Homo sapien
acagcgacggcaacttcgacctggc

SEQ ID NO: 125809 - DNA, 25 bp, Homo sapien
atgtaagtgacgaccggtccggtcc

SEQ ID NO: 125810 - DNA, 25 bp, Homo sapien
atgtaagtgacgtccggtccggtcc

SEQ ID NO: 125811 - DNA, 25 bp, Homo sapien
gatggaatacttactcatgtcacct

SEQ ID NO: 125812 - DNA, 25 bp, Homo sapien
gatggaatactttctcatgtcacct

SEQ ID NO: 125813 - DNA, 25 bp, Homo sapien
gtgtaactaagtaaccgactcccct

SEQ ID NO: 125814 - DNA, 25 bp, Homo sapien
gtgtaactaagttaccgactcccct

SEQ ID NO: 125815 - DNA, 25 bp, Homo sapien
cgagaacgtggtacacctcgcctac

SEQ ID NO: 125816 - DNA, 25 bp, Homo sapien
cgagaacgtggttcacctcgcctac

SEQ ID NO: 125817 - DNA, 25 bp, Homo sapien
cgccgaagagacaccgtcacgccta

SEQ ID NO: 125818 - DNA, 25 bp, Homo sapien
cgccgaagagactccgtcacgccta

SEQ ID NO: 125819 - DNA, 25 bp, Homo sapien
ggacccgctgccagtcttcgcccac

SEQ ID NO: 125820 - DNA, 25 bp, Homo sapien
ggacccgctgcctgtcttcgcccac

SEQ ID NO: 125821 - DNA, 25 bp, Homo sapien
gtagtcgattgctcccgaactgtac

SEQ ID NO: 125822 - DNA, 25 bp, Homo sapien
gtagtcgattgcacccgaactgtac

SEQ ID NO: 125823 - DNA, 25 bp, Homo sapien
atgttaaaacgagaagacaccgtat

SEQ ID NO: 125824 - DNA, 25 bp, Homo sapien
atgttaaaacgacaagacaccgtat

SEQ ID NO: 125825 - DNA, 25 bp, Homo sapien
aatcgtctacaaaaagaaccaaacc

SEQ ID NO: 125826 - DNA, 25 bp, Homo sapien
aatcgtctacaataagaaccaaacc

SEQ ID NO: 125827 - DNA, 25 bp, Homo sapien
accggaccatgaggaactacttccc

SEQ ID NO: 125828 - DNA, 25 bp, Homo sapien
accggaccatgacgaactacttccc

SEQ ID NO: 125829 - DNA, 25 bp, Homo sapien
agaagactcatatcgggaccttttc

SEQ ID NO: 125830 - DNA, 25 bp, Homo sapien
agaagactcataacgggaccttttc

SEQ ID NO: 125831 - DNA, 25 bp, Homo sapien
taacaaaggtgcaccgtccctttct

SEQ ID NO: 125832 - DNA, 25 bp, Homo sapien
taacaaaggtgctccgtccctttct

SEQ ID NO: 125833 - DNA, 25 bp, Homo sapien
acttatggtctctttgaagttatac

SEQ ID NO: 125834 - DNA, 25 bp, Homo sapien
acttatggtctcattgaagttatac

SEQ ID NO: 125835 - DNA, 25 bp, Homo sapien
ccattgttactttgtgaagttacga

SEQ ID NO: 125836 - DNA, 25 bp, Homo sapien
ccattgttacttagtgaagttacga

SEQ ID NO: 125837 - DNA, 25 bp, Homo sapien
ttacggactcattggaatttaaact

SEQ ID NO: 125838 - DNA, 25 bp, Homo sapien
ttacggactcataggaatttaaact

SEQ ID NO: 125839 - DNA, 25 bp, Homo sapien
taaattacgtgtgtaaacttacaat

SEQ ID NO: 125840 - DNA, 25 bp, Homo sapien
taaattacgtgtctaaacttacaat

SEQ ID NO: 125841 - DNA, 25 bp, Homo sapien
ctcgatggtgtgttacaaatttcat

SEQ ID NO: 125842 - DNA, 25 bp, Homo sapien
ctcgatggtgtgatacaaatttcat

SEQ ID NO: 125843 - DNA, 25 bp, Homo sapien
tttcgacatcactgtgaacattcag

SEQ ID NO: 125844 - DNA, 25 bp, Homo sapien
tttcgacatcacagtgaacattcag

SEQ ID NO: 125845 - DNA, 25 bp, Homo sapien
gtatacacgccctttatttctagac

SEQ ID NO: 125846 - DNA, 25 bp, Homo sapien
gtatacacgcccattatttctagac

SEQ ID NO: 125847 - DNA, 25 bp, Homo sapien
ctacgaactccaacgaagtcacaag

SEQ ID NO: 125848 - DNA, 25 bp, Homo sapien
ctacgaactccatcgaagtcacaag

SEQ ID NO: 125849 - DNA, 25 bp, Homo sapien
agactagttagttaccgatacaaag

SEQ ID NO: 125850 - DNA, 25 bp, Homo sapien
agactagttagtaaccgatacaaag

SEQ ID NO: 125851 - DNA, 25 bp, Homo sapien
gaagtgacgtcttcgactctacaag

SEQ ID NO: 125852 - DNA, 25 bp, Homo sapien
gaagtgacgtctacgactctacaag

SEQ ID NO: 125853 - DNA, 25 bp, Homo sapien
agtattccccgtcgttacttgtacg

SEQ ID NO: 125854 - DNA, 25 bp, Homo sapien
agtattccccgtggttacttgtacg

SEQ ID NO: 125855 - DNA, 25 bp, Homo sapien
gatagttccaatcacagatatagat

SEQ ID NO: 125856 - DNA, 25 bp, Homo sapien
gatagttccaatgacagatatagat

SEQ ID NO: 125857 - DNA, 25 bp, Homo sapien
taaatttcgcaaaacacgtgattgt

SEQ ID NO: 125858 - DNA, 25 bp, Homo sapien
taaatttcgcaatacacgtgattgt

SEQ ID NO: 125859 - DNA, 25 bp, Homo sapien
ttctggtgtttccagttaccccttc

SEQ ID NO: 125860 - DNA, 25 bp, Homo sapien
ttctggtgtttcgagttaccccttc

SEQ ID NO: 125861 - DNA, 25 bp, Homo sapien
atggtttatcttaagagttctcttc

SEQ ID NO: 125862 - DNA, 25 bp, Homo sapien
atggtttatctttagagttctcttc

SEQ ID NO: 125863 - DNA, 25 bp, Homo sapien
aggaggaagtctgtcacgacacccc

SEQ ID NO: 125864 - DNA, 25 bp, Homo sapien
aggaggaagtctctcacgacacccc

SEQ ID NO: 125865 - DNA, 25 bp, Homo sapien
gtcaggtagtgcctcgcgtccgcca

SEQ ID NO: 125866 - DNA, 25 bp, Homo sapien
gtcaggtagtgcgtcgcgtccgcca

SEQ ID NO: 125867 - DNA, 25 bp, Homo sapien
cctaggtccggttccgtgaccgaca

SEQ ID NO: 125868 - DNA, 25 bp, Homo sapien
cctaggtccggtaccgtgaccgaca

SEQ ID NO: 125869 - DNA, 25 bp, Homo sapien
cgcgggtgctgcagtgacatccact

SEQ ID NO: 125870 - DNA, 25 bp, Homo sapien
cgcgggtgctgctgtgacatccact

SEQ ID NO: 125871 - DNA, 25 bp, Homo sapien
gtccgagggacgagaccaacttcat

SEQ ID NO: 125872 - DNA, 25 bp, Homo sapien
gtccgagggacgtgaccaacttcat

SEQ ID NO: 125873 - DNA, 25 bp, Homo sapien
cggtctgggaacgtggtagaacccc

SEQ ID NO: 125874 - DNA, 25 bp, Homo sapien
cggtctgggaacctggtagaacccc

SEQ ID NO: 125875 - DNA, 25 bp, Homo sapien
gcgtctatggaggatgatggtcccc

SEQ ID NO: 125876 - DNA, 25 bp, Homo sapien
gcgtctatggagcatgatggtcccc

SEQ ID NO: 125877 - DNA, 25 bp, Homo sapien
ctgttggaagtggttgagaaccgtc

SEQ ID NO: 125878 - DNA, 25 bp, Homo sapien
ctgttggaagtgcttgagaaccgtc

SEQ ID NO: 125879 - DNA, 25 bp, Homo sapien
tgtctgtagaattctattgaaccct

SEQ ID NO: 125880 - DNA, 25 bp, Homo sapien
tgtctgtagaatactattgaaccct

SEQ ID NO: 125881 - DNA, 25 bp, Homo sapien
gtccgtgaacatctctaaacaccgg

SEQ ID NO: 125882 - DNA, 25 bp, Homo sapien
gtccgtgaacatgtctaaacaccgg

SEQ ID NO: 125883 - DNA, 25 bp, Homo sapien
caaacaggacgttggtccaagaggg

SEQ ID NO: 125884 - DNA, 25 bp, Homo sapien
caaacaggacgtaggtccaagaggg

SEQ ID NO: 125885 - DNA, 25 bp, Homo sapien
aactaacggacaatgtctgggcgga

SEQ ID NO: 125886 - DNA, 25 bp, Homo sapien
aactaacggacattgtctgggcgga

SEQ ID NO: 125887 - DNA, 25 bp, Homo sapien
tattttagaacctaatgcggtgacc

SEQ ID NO: 125888 - DNA, 25 bp, Homo sapien
tattttagaaccaaatgcggtgacc

SEQ ID NO: 125889 - DNA, 25 bp, Homo sapien
agtttaaagagtaaaacccggtgcc

SEQ ID NO: 125890 - DNA, 25 bp, Homo sapien
agtttaaagagttaaacccggtgcc

SEQ ID NO: 125891 - DNA, 25 bp, Homo sapien
ggatgtaagtttcatgcccataaac

SEQ ID NO: 125892 - DNA, 25 bp, Homo sapien
ggatgtaagtttgatgcccataaac

SEQ ID NO: 125893 - DNA, 25 bp, Homo sapien
gtttacgtgattatccagatacact

SEQ ID NO: 125894 - DNA, 25 bp, Homo sapien
gtttacgtgattttccagatacact

SEQ ID NO: 125895 - DNA, 25 bp, Homo sapien
tagttaggtagtagaccccgtgtcc

SEQ ID NO: 125896 - DNA, 25 bp, Homo sapien
tagttaggtagttgaccccgtgtcc

SEQ ID NO: 125897 - DNA, 25 bp, Homo sapien
tttataacgtatactcctccggccg

SEQ ID NO: 125898 - DNA, 25 bp, Homo sapien
tttataacgtattctcctccggccg

SEQ ID NO: 125899 - DNA, 25 bp, Homo sapien
tgtttctctgtctgtaccacagtcc

SEQ ID NO: 125900 - DNA, 25 bp, Homo sapien
tgtttctctgtcagtaccacagtcc

SEQ ID NO: 125901 - DNA, 25 bp, Homo sapien
gtaatcctctgttagttcacagtcc

SEQ ID NO: 125902 - DNA, 25 bp, Homo sapien
gtaatcctctgtaagttcacagtcc

SEQ ID NO: 125903 - DNA, 25 bp, Homo sapien
gtgatcattacaggaactcctacta

SEQ ID NO: 125904 - DNA, 25 bp, Homo sapien
gtgatcattacacgaactcctacta

SEQ ID NO: 125905 - DNA, 25 bp, Homo sapien
ggtggtataggactgacgatcacca

SEQ ID NO: 125906 - DNA, 25 bp, Homo sapien
ggtggtataggagtgacgatcacca

SEQ ID NO: 125907 - DNA, 25 bp, Homo sapien
ggacttcagaacgtggagtgtctca

SEQ ID NO: 125908 - DNA, 25 bp, Homo sapien
ggacttcagaacctggagtgtctca

SEQ ID NO: 125909 - DNA, 25 bp, Homo sapien
gtgacctctgagccaaggacggtca

SEQ ID NO: 125910 - DNA, 25 bp, Homo sapien
gtgacctctgaggcaaggacggtca

SEQ ID NO: 125911 - DNA, 25 bp, Homo sapien
gaggatcccacctaaagtaagtcta

SEQ ID NO: 125912 - DNA, 25 bp, Homo sapien
gaggatcccaccaaaagtaagtcta

SEQ ID NO: 125913 - DNA, 25 bp, Homo sapien
gtgagttgatcctcagagacaagga

SEQ ID NO: 125914 - DNA, 25 bp, Homo sapien
gtgagttgatccacagagacaagga

SEQ ID NO: 125915 - DNA, 25 bp, Homo sapien
ttcaattcgcatcagagacctgagg

SEQ ID NO: 125916 - DNA, 25 bp, Homo sapien
ttcaattcgcatgagagacctgagg

SEQ ID NO: 125917 - DNA, 25 bp, Homo sapien
atcacaacgcaatcggaccgagagg

SEQ ID NO: 125918 - DNA, 25 bp, Homo sapien
atcacaacgcaaacggaccgagagg

SEQ ID NO: 125919 - DNA, 25 bp, Homo sapien
aaccgaattgacaccgaccactacc

SEQ ID NO: 125920 - DNA, 25 bp, Homo sapien
aaccgaattgactccgaccactacc

SEQ ID NO: 125921 - DNA, 25 bp, Homo sapien
agagtcttgtcctcgtaagtaaggt

SEQ ID NO: 125922 - DNA, 25 bp, Homo sapien
agagtcttgtccacgtaagtaaggt

SEQ ID NO: 125923 - DNA, 25 bp, Homo sapien
gaagagaaagcagaccagtgagtct

SEQ ID NO: 125924 - DNA, 25 bp, Homo sapien
gaagagaaagcacaccagtgagtct

SEQ ID NO: 125925 - DNA, 25 bp, Homo sapien
gaagtaaaggacacctacaaagtat

SEQ ID NO: 125926 - DNA, 25 bp, Homo sapien
gaagtaaaggactcctacaaagtat

SEQ ID NO: 125927 - DNA, 25 bp, Homo sapien
aaggggttctcgatcaaatcatcta

SEQ ID NO: 125928 - DNA, 25 bp, Homo sapien
aaggggttctcgttcaaatcatcta

SEQ ID NO: 125929 - DNA, 25 bp, Homo sapien
ggtgttccgtttagataccggtagt

SEQ ID NO: 125930 - DNA, 25 bp, Homo sapien
ggtgttccgttttgataccggtagt

SEQ ID NO: 125931 - DNA, 25 bp, Homo sapien
gtgtcgacacaattgttactaagta

SEQ ID NO: 125932 - DNA, 25 bp, Homo sapien
gtgtcgacacaaatgttactaagta

SEQ ID NO: 125933 - DNA, 25 bp, Homo sapien
gtctgccgctcttacagtaatatag

SEQ ID NO: 125934 - DNA, 25 bp, Homo sapien
gtctgccgctctaacagtaatatag

SEQ ID NO: 125935 - DNA, 25 bp, Homo sapien
atgttcgtcagactgagggttacga

SEQ ID NO: 125936 - DNA, 25 bp, Homo sapien
atgttcgtcagagtgagggttacga

SEQ ID NO: 125937 - DNA, 25 bp, Homo sapien
agtggtcagaggactgtcgtctcgg

SEQ ID NO: 125938 - DNA, 25 bp, Homo sapien
agtggtcagaggtctgtcgtctcgg

SEQ ID NO: 125939 - DNA, 25 bp, Homo sapien
agggactctgggttctacgtcgtca

SEQ ID NO: 125940 - DNA, 25 bp, Homo sapien
agggactctgggatctacgtcgtca

SEQ ID NO: 125941 - DNA, 25 bp, Homo sapien
aagtctcgttgaagaaccgtcgtca

SEQ ID NO: 125942 - DNA, 25 bp, Homo sapien
aagtctcgttgatgaaccgtcgtca

SEQ ID NO: 125943 - DNA, 25 bp, Homo sapien
gtagatctactctatggtcccgtaa

SEQ ID NO: 125944 - DNA, 25 bp, Homo sapien
gtagatctactcaatggtcccgtaa

SEQ ID NO: 125945 - DNA, 25 bp, Homo sapien
tagtgtcgctctgtgtttttctacc

SEQ ID NO: 125946 - DNA, 25 bp, Homo sapien
tagtgtcgctctctgtttttctacc

SEQ ID NO: 125947 - DNA, 25 bp, Homo sapien
acggattacgtgtaatttacttacc

SEQ ID NO: 125948 - DNA, 25 bp, Homo sapien
acggattacgtgaaatttacttacc

SEQ ID NO: 125949 - DNA, 25 bp, Homo sapien
caaaaggaggagacagagtcaagtc

SEQ ID NO: 125950 - DNA, 25 bp, Homo sapien
caaaaggaggagtcagagtcaagtc

SEQ ID NO: 125951 - DNA, 25 bp, Homo sapien
atataggcgaaggtaacagcatagc

SEQ ID NO: 125952 - DNA, 25 bp, Homo sapien
atataggcgaagctaacagcatagc

SEQ ID NO: 125953 - DNA, 25 bp, Homo sapien
ccgacgaccacagacgagagccgga

SEQ ID NO: 125954 - DNA, 25 bp, Homo sapien
ccgacgaccacacacgagagccgga

SEQ ID NO: 125955 - DNA, 25 bp, Homo sapien
tctacgccaagtaccggacgtgccg

SEQ ID NO: 125956 - DNA, 25 bp, Homo sapien
tctacgccaagttccggacgtgccg

SEQ ID NO: 125957 - DNA, 25 bp, Homo sapien
gagttccaaggtacgccggtgtcgc

SEQ ID NO: 125958 - DNA, 25 bp, Homo sapien
gagttccaaggttcgccggtgtcgc

SEQ ID NO: 125959 - DNA, 25 bp, Homo sapien
gtaatcaacgtctgtgcaagtaagg

SEQ ID NO: 125960 - DNA, 25 bp, Homo sapien
gtaatcaacgtcagtgcaagtaagg

SEQ ID NO: 125961 - DNA, 25 bp, Homo sapien
cggtactggatgaatccgatgttaa

SEQ ID NO: 125962 - DNA, 25 bp, Homo sapien
cggtactggatgtatccgatgttaa

SEQ ID NO: 125963 - DNA, 25 bp, Homo sapien
aaggaaagctacgtttcatattaac

SEQ ID NO: 125964 - DNA, 25 bp, Homo sapien
aaggaaagctacctttcatattaac

SEQ ID NO: 125965 - DNA, 25 bp, Homo sapien
atgccatgtatatttacgttatcaa

SEQ ID NO: 125966 - DNA, 25 bp, Homo sapien
atgccatgtataattacgttatcaa

SEQ ID NO: 125967 - DNA, 25 bp, Homo sapien
atgacgagatgattactccgatcaa

SEQ ID NO: 125968 - DNA, 25 bp, Homo sapien
atgacgagatgaatactccgatcaa

SEQ ID NO: 125969 - DNA, 25 bp, Homo sapien
tgaagaacacagttaccaccactac

SEQ ID NO: 125970 - DNA, 25 bp, Homo sapien
tgaagaacacagataccaccactac

SEQ ID NO: 125971 - DNA, 25 bp, Homo sapien
acagattacgactgtctgaccttac

SEQ ID NO: 125972 - DNA, 25 bp, Homo sapien
acagattacgacagtctgaccttac

SEQ ID NO: 125973 - DNA, 25 bp, Homo sapien
aaggatacacgtagacttcatacat

SEQ ID NO: 125974 - DNA, 25 bp, Homo sapien
aaggatacacgttgacttcatacat

SEQ ID NO: 125975 - DNA, 25 bp, Homo sapien
gtaacaattacatgttctcgtaaag

SEQ ID NO: 125976 - DNA, 25 bp, Homo sapien
gtaacaattacaagttctcgtaaag

SEQ ID NO: 125977 - DNA, 25 bp, Homo sapien
ctgtgtgaatttctcgtatgcaaat

SEQ ID NO: 125978 - DNA, 25 bp, Homo sapien
ctgtgtgaatttgtcgtatgcaaat

SEQ ID NO: 125979 - DNA, 25 bp, Homo sapien
agcttgaactttaatcgtttcaaag

SEQ ID NO: 125980 - DNA, 25 bp, Homo sapien
agcttgaacttttatcgtttcaaag

SEQ ID NO: 125981 - DNA, 25 bp, Homo sapien
tatctaccttttaacttataagaca

SEQ ID NO: 125982 - DNA, 25 bp, Homo sapien
tatctacctttttacttataagaca

SEQ ID NO: 125983 - DNA, 25 bp, Homo sapien
cggacccccacttgggggcgactac

SEQ ID NO: 125984 - DNA, 25 bp, Homo sapien
cggacccccactagggggcgactac

SEQ ID NO: 125985 - DNA, 25 bp, Homo sapien
tcccggaacacttgggggtaacgtc

SEQ ID NO: 125986 - DNA, 25 bp, Homo sapien
tcccggaacactagggggtaacgtc

SEQ ID NO: 125987 - DNA, 25 bp, Homo sapien
ttcatctgtaaacaggaagacccct

SEQ ID NO: 125988 - DNA, 25 bp, Homo sapien
ttcatctgtaaagaggaagacccct

SEQ ID NO: 125989 - DNA, 25 bp, Homo sapien
tcgtaccgccggtggagaggccctc

SEQ ID NO: 125990 - DNA, 25 bp, Homo sapien
tcgtaccgccggaggagaggccctc

SEQ ID NO: 125991 - DNA, 25 bp, Homo sapien
gtctacttctggaccctcgggaatg

SEQ ID NO: 125992 - DNA, 25 bp, Homo sapien
gtctacttctggtccctcgggaatg

SEQ ID NO: 125993 - DNA, 25 bp, Homo sapien
gctctggctccgtccgttaggagtc

SEQ ID NO: 125994 - DNA, 25 bp, Homo sapien
gctctggctccgaccgttaggagtc

SEQ ID NO: 125995 - DNA, 25 bp, Homo sapien
ggggtcaaacccaagccggagacgc

SEQ ID NO: 125996 - DNA, 25 bp, Homo sapien
ggggtcaaaccctagccggagacgc

SEQ ID NO: 125997 - DNA, 25 bp, Homo sapien
gtcagaaaccaaacctagtccgacg

SEQ ID NO: 125998 - DNA, 25 bp, Homo sapien
gtcagaaaccaatcctagtccgacg

SEQ ID NO: 125999 - DNA, 25 bp, Homo sapien
gagggtgacaaaccattctgtcctt

SEQ ID NO: 126000 - DNA, 25 bp, Homo sapien
gagggtgacaaagcattctgtcctt

SEQ ID NO: 126001 - DNA, 25 bp, Homo sapien
taaaaggtaaaacatcatgaaccgt

SEQ ID NO: 126002 - DNA, 25 bp, Homo sapien
taaaaggtaaaagatcatgaaccgt

SEQ ID NO: 126003 - DNA, 25 bp, Homo sapien
aagaggtctttgtgctagtaaagtt

SEQ ID NO: 126004 - DNA, 25 bp, Homo sapien
aagaggtctttgagctagtaaagtt

SEQ ID NO: 126005 - DNA, 25 bp, Homo sapien
atcgtacttgatagactcgttttat

SEQ ID NO: 126006 - DNA, 25 bp, Homo sapien
atcgtacttgattgactcgttttat

SEQ ID NO: 126007 - DNA, 25 bp, Homo sapien
catccgggagtctcgcgactgtaga

SEQ ID NO: 126008 - DNA, 25 bp, Homo sapien
catccgggagtcacgcgactgtaga

SEQ ID NO: 126009 - DNA, 25 bp, Homo sapien
ccgctgcagccgaagtcgagtctca

SEQ ID NO: 126010 - DNA, 25 bp, Homo sapien
ccgctgcagccgtagtcgagtctca

SEQ ID NO: 126011 - DNA, 25 bp, Homo sapien
atcagagtcctcagtcacgtcctcg

SEQ ID NO: 126012 - DNA, 25 bp, Homo sapien
atcagagtcctctgtcacgtcctcg

SEQ ID NO: 126013 - DNA, 25 bp, Homo sapien
gtctaattcccgagtcctaccatgt

SEQ ID NO: 126014 - DNA, 25 bp, Homo sapien
gtctaattcccgtgtcctaccatgt

SEQ ID NO: 126015 - DNA, 25 bp, Homo sapien
tgggtgcccacttgtgttctgaggt

SEQ ID NO: 126016 - DNA, 25 bp, Homo sapien
tgggtgcccactagtgttctgaggt

SEQ ID NO: 126017 - DNA, 25 bp, Homo sapien
ggagtgtctcggtcgatccatgacc

SEQ ID NO: 126018 - DNA, 25 bp, Homo sapien
ggagtgtctcggacgatccatgacc

SEQ ID NO: 126019 - DNA, 25 bp, Homo sapien
tgatgtcgtgaaaagtctttgtacc

SEQ ID NO: 126020 - DNA, 25 bp, Homo sapien
tgatgtcgtgaatagtctttgtacc

SEQ ID NO: 126021 - DNA, 25 bp, Homo sapien
accggtcgtaggtgttctgccgccg

SEQ ID NO: 126022 - DNA, 25 bp, Homo sapien
accggtcgtaggagttctgccgccg

SEQ ID NO: 126023 - DNA, 25 bp, Homo sapien
cgatcaggttcaggaggctagtcct

SEQ ID NO: 126024 - DNA, 25 bp, Homo sapien
cgatcaggttcacgaggctagtcct

SEQ ID NO: 126025 - DNA, 25 bp, Homo sapien
acccctacgtgttgggtgtgaattg

SEQ ID NO: 126026 - DNA, 25 bp, Homo sapien
acccctacgtgtagggtgtgaattg

SEQ ID NO: 126027 - DNA, 25 bp, Homo sapien
ctccctctagccagtcgtcgaaatg

SEQ ID NO: 126028 - DNA, 25 bp, Homo sapien
ctccctctagcctgtcgtcgaaatg

SEQ ID NO: 126029 - DNA, 25 bp, Homo sapien
cgagctccttcttccatccttaggg

SEQ ID NO: 126030 - DNA, 25 bp, Homo sapien
cgagctccttctaccatccttaggg

SEQ ID NO: 126031 - DNA, 25 bp, Homo sapien
ccccggtgacatgtgcagagacaga

SEQ ID NO: 126032 - DNA, 25 bp, Homo sapien
ccccggtgacatctgcagagacaga

SEQ ID NO: 126033 - DNA, 25 bp, Homo sapien
gtatgtgttcgactagttagaagta

SEQ ID NO: 126034 - DNA, 25 bp, Homo sapien
gtatgtgttcgagtagttagaagta

SEQ ID NO: 126035 - DNA, 25 bp, Homo sapien
ggtggaaagaatcctttagtctcaa

SEQ ID NO: 126036 - DNA, 25 bp, Homo sapien
ggtggaaagaatgctttagtctcaa

SEQ ID NO: 126037 - DNA, 25 bp, Homo sapien
gtgataagaaacgacttttcccact

SEQ ID NO: 126038 - DNA, 25 bp, Homo sapien
gtgataagaaaccacttttcccact

SEQ ID NO: 126039 - DNA, 25 bp, Homo sapien
aaaagagacacacttttgcgtcact

SEQ ID NO: 126040 - DNA, 25 bp, Homo sapien
aaaagagacacagttttgcgtcact

SEQ ID NO: 126041 - DNA, 25 bp, Homo sapien
aaggagagacccttacgggtccgag

SEQ ID NO: 126042 - DNA, 25 bp, Homo sapien
aaggagagacccatacgggtccgag

SEQ ID NO: 126043 - DNA, 25 bp, Homo sapien
aagggggataccttctgtgtctagg

SEQ ID NO: 126044 - DNA, 25 bp, Homo sapien
aagggggataccatctgtgtctagg

SEQ ID NO: 126045 - DNA, 25 bp, Homo sapien
acgtcgcgcgggtacagcatcgcca

SEQ ID NO: 126046 - DNA, 25 bp, Homo sapien
acgtcgcgcgggaacagcatcgcca

SEQ ID NO: 126047 - DNA, 25 bp, Homo sapien
ctccgggtggtactgctactgccac

SEQ ID NO: 126048 - DNA, 25 bp, Homo sapien
ctccgggtggtagtgctactgccac

SEQ ID NO: 126049 - DNA, 25 bp, Homo sapien
aggtggttgacattcttagtaccac

SEQ ID NO: 126050 - DNA, 25 bp, Homo sapien
aggtggttgacaatcttagtaccac

SEQ ID NO: 126051 - DNA, 25 bp, Homo sapien
agggttgtcttttcaattagaccac

SEQ ID NO: 126052 - DNA, 25 bp, Homo sapien
agggttgtctttacaattagaccac

SEQ ID NO: 126053 - DNA, 25 bp, Homo sapien
ggatcctccggcaagagtaacgtca

SEQ ID NO: 126054 - DNA, 25 bp, Homo sapien
ggatcctccggctagagtaacgtca

SEQ ID NO: 126055 - DNA, 25 bp, Homo sapien
actcaaggagtcacactaacgtcgg

SEQ ID NO: 126056 - DNA, 25 bp, Homo sapien
actcaaggagtctcactaacgtcgg

SEQ ID NO: 126057 - DNA, 25 bp, Homo sapien
gactccgagaaggaccccgagcggc

SEQ ID NO: 126058 - DNA, 25 bp, Homo sapien
gactccgagaagcaccccgagcggc

SEQ ID NO: 126059 - DNA, 25 bp, Homo sapien
ccaaggacatggtcaggagctagtg

SEQ ID NO: 126060 - DNA, 25 bp, Homo sapien
ccaaggacatggacaggagctagtg

SEQ ID NO: 126061 - DNA, 25 bp, Homo sapien
cacatagtccatagccagaaggaga

SEQ ID NO: 126062 - DNA, 25 bp, Homo sapien
cacatagtccattgccagaaggaga

SEQ ID NO: 126063 - DNA, 25 bp, Homo sapien
gtctatgtatgacagaacttacgct

SEQ ID NO: 126064 - DNA, 25 bp, Homo sapien
gtctatgtatgagagaacttacgct

SEQ ID NO: 126065 - DNA, 25 bp, Homo sapien
tcttagttatcgaagaaacttcggt

SEQ ID NO: 126066 - DNA, 25 bp, Homo sapien
tcttagttatcgtagaaacttcggt

SEQ ID NO: 126067 - DNA, 25 bp, Homo sapien
tttatctggtgtgagaactcctcgt

SEQ ID NO: 126068 - DNA, 25 bp, Homo sapien
tttatctggtgtcagaactcctcgt

SEQ ID NO: 126069 - DNA, 25 bp, Homo sapien
ccttgtctggttgttttaccctcct

SEQ ID NO: 126070 - DNA, 25 bp, Homo sapien
ccttgtctggttcttttaccctcct

SEQ ID NO: 126071 - DNA, 25 bp, Homo sapien
ggactcagaatttctgtctttcttc

SEQ ID NO: 126072 - DNA, 25 bp, Homo sapien
ggactcagaattactgtctttcttc

SEQ ID NO: 126073 - DNA, 25 bp, Homo sapien
gtattagacaataccgtcttattgg

SEQ ID NO: 126074 - DNA, 25 bp, Homo sapien
gtattagacaattccgtcttattgg

SEQ ID NO: 126075 - DNA, 25 bp, Homo sapien
catgacttttacatttcgattctgg

SEQ ID NO: 126076 - DNA, 25 bp, Homo sapien
catgacttttacttttcgattctgg

SEQ ID NO: 126077 - DNA, 25 bp, Homo sapien
tcatcctacttttgggtgtcgtaga

SEQ ID NO: 126078 - DNA, 25 bp, Homo sapien
tcatcctactttagggtgtcgtaga

SEQ ID NO: 126079 - DNA, 25 bp, Homo sapien
ttatgtaaccctatgttagtcgaga

SEQ ID NO: 126080 - DNA, 25 bp, Homo sapien
ttatgtaaccctttgttagtcgaga

SEQ ID NO: 126081 - DNA, 25 bp, Homo sapien
cgtcgaaactgtgagtgtctctgta

SEQ ID NO: 126082 - DNA, 25 bp, Homo sapien
cgtcgaaactgtcagtgtctctgta

SEQ ID NO: 126083 - DNA, 25 bp, Homo sapien
tggtacatctgtacgacgtggtaga

SEQ ID NO: 126084 - DNA, 25 bp, Homo sapien
tggtacatctgttcgacgtggtaga

SEQ ID NO: 126085 - DNA, 25 bp, Homo sapien
cagtggactgttttcgacaggtaat

SEQ ID NO: 126086 - DNA, 25 bp, Homo sapien
cagtggactgttatcgacaggtaat

SEQ ID NO: 126087 - DNA, 25 bp, Homo sapien
gtcggcgctgaactacaggtactcg

SEQ ID NO: 126088 - DNA, 25 bp, Homo sapien
gtcggcgctgaagtacaggtactcg

SEQ ID NO: 126089 - DNA, 25 bp, Homo sapien
ctctgtcatcgtatgaaccgggacc

SEQ ID NO: 126090 - DNA, 25 bp, Homo sapien
ctctgtcatcgtttgaaccgggacc

SEQ ID NO: 126091 - DNA, 25 bp, Homo sapien
ttacccgggttgatacggcggacgt

SEQ ID NO: 126092 - DNA, 25 bp, Homo sapien
ttacccgggttgttacggcggacgt

SEQ ID NO: 126093 - DNA, 25 bp, Homo sapien
gtctccttggattctctggtgtaga

SEQ ID NO: 126094 - DNA, 25 bp, Homo sapien
gtctccttggatactctggtgtaga

SEQ ID NO: 126095 - DNA, 25 bp, Homo sapien
ccctcacgtgtacatgtgtgcgtga

SEQ ID NO: 126096 - DNA, 25 bp, Homo sapien
ccctcacgtgtagatgtgtgcgtga

SEQ ID NO: 126097 - DNA, 25 bp, Homo sapien
cccctgtcggagtcgagtgtctggt

SEQ ID NO: 126098 - DNA, 25 bp, Homo sapien
cccctgtcggagacgagtgtctggt

SEQ ID NO: 126099 - DNA, 25 bp, Homo sapien
aaagtccttcgtaagggtgttttac

SEQ ID NO: 126100 - DNA, 25 bp, Homo sapien
aaagtccttcgttagggtgttttac

SEQ ID NO: 126101 - DNA, 25 bp, Homo sapien
agtctcttctgactacggtattcct

SEQ ID NO: 126102 - DNA, 25 bp, Homo sapien
agtctcttctgagtacggtattcct

SEQ ID NO: 126103 - DNA, 25 bp, Homo sapien
atcggtgtattttgactagtatgtt

SEQ ID NO: 126104 - DNA, 25 bp, Homo sapien
atcggtgtatttagactagtatgtt

SEQ ID NO: 126105 - DNA, 25 bp, Homo sapien
ggacggcgtatttcacgaacttgtc

SEQ ID NO: 126106 - DNA, 25 bp, Homo sapien
ggacggcgtattacacgaacttgtc

SEQ ID NO: 126107 - DNA, 25 bp, Homo sapien
gtaggccaccgaagatacatgtccg

SEQ ID NO: 126108 - DNA, 25 bp, Homo sapien
gtaggccaccgatgatacatgtccg

SEQ ID NO: 126109 - DNA, 25 bp, Homo sapien
ggacggaccaaaaggtcctccttcc

SEQ ID NO: 126110 - DNA, 25 bp, Homo sapien
ggacggaccaaatggtcctccttcc

SEQ ID NO: 126111 - DNA, 25 bp, Homo sapien
tgagtgtcaaatcgttccgacttcc

SEQ ID NO: 126112 - DNA, 25 bp, Homo sapien
tgagtgtcaaatggttccgacttcc

SEQ ID NO: 126113 - DNA, 25 bp, Homo sapien
tgtgacaacagttagtccttcttta

SEQ ID NO: 126114 - DNA, 25 bp, Homo sapien
tgtgacaacagtaagtccttcttta

SEQ ID NO: 126115 - DNA, 25 bp, Homo sapien
tggtctgacataatcctgtcatatc

SEQ ID NO: 126116 - DNA, 25 bp, Homo sapien
tggtctgacatattcctgtcatatc

SEQ ID NO: 126117 - DNA, 25 bp, Homo sapien
atggtcgttagaatccttccgtttt

SEQ ID NO: 126118 - DNA, 25 bp, Homo sapien
atggtcgttagattccttccgtttt

SEQ ID NO: 126119 - DNA, 25 bp, Homo sapien
gtgcgttgttcgtgtccttaaattt

SEQ ID NO: 126120 - DNA, 25 bp, Homo sapien
gtgcgttgttcgagtccttaaattt

SEQ ID NO: 126121 - DNA, 25 bp, Homo sapien
accctaccgccgttcttaagatatg

SEQ ID NO: 126122 - DNA, 25 bp, Homo sapien
accctaccgccgatcttaagatatg

SEQ ID NO: 126123 - DNA, 25 bp, Homo sapien
aaggaaatctccagtataagaatct

SEQ ID NO: 126124 - DNA, 25 bp, Homo sapien
aaggaaatctcctgtataagaatct

SEQ ID NO: 126125 - DNA, 25 bp, Homo sapien
gaagaaacccgtagtcaaaaagtat

SEQ ID NO: 126126 - DNA, 25 bp, Homo sapien
gaagaaacccgttgtcaaaaagtat

SEQ ID NO: 126127 - DNA, 25 bp, Homo sapien
caagaagaccggtctttggacatat

SEQ ID NO: 126128 - DNA, 25 bp, Homo sapien
caagaagaccggactttggacatat

SEQ ID NO: 126129 - DNA, 25 bp, Homo sapien
gcgagtatcgggacgtcaaccagaa

SEQ ID NO: 126130 - DNA, 25 bp, Homo sapien
gcgagtatcgggtcgtcaaccagaa

SEQ ID NO: 126131 - DNA, 25 bp, Homo sapien
agaggaagggttttacaatcacaca

SEQ ID NO: 126132 - DNA, 25 bp, Homo sapien
agaggaagggttatacaatcacaca

SEQ ID NO: 126133 - DNA, 25 bp, Homo sapien
ggtgtcgacgggtgaagaccttcca

SEQ ID NO: 126134 - DNA, 25 bp, Homo sapien
ggtgtcgacgggagaagaccttcca

SEQ ID NO: 126135 - DNA, 25 bp, Homo sapien
gtggcgacaccacaatctgtcctag

SEQ ID NO: 126136 - DNA, 25 bp, Homo sapien
gtggcgacaccagaatctgtcctag

SEQ ID NO: 126137 - DNA, 25 bp, Homo sapien
accggaccgtgtgaacctctcttcg

SEQ ID NO: 126138 - DNA, 25 bp, Homo sapien
accggaccgtgtcaacctctcttcg

SEQ ID NO: 126139 - DNA, 25 bp, Homo sapien
cgaaggccttcatctactactcttg

SEQ ID NO: 126140 - DNA, 25 bp, Homo sapien
cgaaggccttcaactactactcttg

SEQ ID NO: 126141 - DNA, 25 bp, Homo sapien
ccgccggggagtcacaccacttgtg

SEQ ID NO: 126142 - DNA, 25 bp, Homo sapien
ccgccggggagtgacaccacttgtg

SEQ ID NO: 126143 - DNA, 25 bp, Homo sapien
tctaccggagggaccgtccacgatc

SEQ ID NO: 126144 - DNA, 25 bp, Homo sapien
tctaccggagggtccgtccacgatc

SEQ ID NO: 126145 - DNA, 25 bp, Homo sapien
ctctggtagggttggtgtacaatac

SEQ ID NO: 126146 - DNA, 25 bp, Homo sapien
ctctggtagggtaggtgtacaatac

SEQ ID NO: 126147 - DNA, 25 bp, Homo sapien
tcagtgtcgttcgagagacattgtg

SEQ ID NO: 126148 - DNA, 25 bp, Homo sapien
tcagtgtcgttccagagacattgtg

SEQ ID NO: 126149 - DNA, 25 bp, Homo sapien
gtgtttagactttccggaatgtaca

SEQ ID NO: 126150 - DNA, 25 bp, Homo sapien
gtgtttagacttaccggaatgtaca

SEQ ID NO: 126151 - DNA, 25 bp, Homo sapien
acggtaactccttccgaagagaacg

SEQ ID NO: 126152 - DNA, 25 bp, Homo sapien
acggtaactcctaccgaagagaacg

SEQ ID NO: 126153 - DNA, 25 bp, Homo sapien
accgctcacagacgacgacagagaa

SEQ ID NO: 126154 - DNA, 25 bp, Homo sapien
accgctcacagaggacgacagagaa

SEQ ID NO: 126155 - DNA, 25 bp, Homo sapien
agtgtgaccccaactgaacagaaca

SEQ ID NO: 126156 - DNA, 25 bp, Homo sapien
agtgtgaccccatctgaacagaaca

SEQ ID NO: 126157 - DNA, 25 bp, Homo sapien
gaagaggcacggagtcggaaatcaa

SEQ ID NO: 126158 - DNA, 25 bp, Homo sapien
gaagaggcacggtgtcggaaatcaa

SEQ ID NO: 126159 - DNA, 25 bp, Homo sapien
aaggtcatgaactggtataactccc

SEQ ID NO: 126160 - DNA, 25 bp, Homo sapien
aaggtcatgaacaggtataactccc

SEQ ID NO: 126161 - DNA, 25 bp, Homo sapien
ggaaccattcattgagaactacctc

SEQ ID NO: 126162 - DNA, 25 bp, Homo sapien
ggaaccattcatagagaactacctc

SEQ ID NO: 126163 - DNA, 25 bp, Homo sapien
acgaacaccgttcgagtaaactaaa

SEQ ID NO: 126164 - DNA, 25 bp, Homo sapien
acgaacaccgttggagtaaactaaa

SEQ ID NO: 126165 - DNA, 25 bp, Homo sapien
tagatcttacgttggagccacgaaa

SEQ ID NO: 126166 - DNA, 25 bp, Homo sapien
tagatcttacgtaggagccacgaaa

SEQ ID NO: 126167 - DNA, 25 bp, Homo sapien
tggtagatcgcacatttccacaaac

SEQ ID NO: 126168 - DNA, 25 bp, Homo sapien
tggtagatcgcagatttccacaaac

SEQ ID NO: 126169 - DNA, 25 bp, Homo sapien
gtagatttaaagaatacctgaacct

SEQ ID NO: 126170 - DNA, 25 bp, Homo sapien
gtagatttaaagtatacctgaacct

SEQ ID NO: 126171 - DNA, 25 bp, Homo sapien
atattgttgggatatccgacaccgt

SEQ ID NO: 126172 - DNA, 25 bp, Homo sapien
atattgttgggaaatccgacaccgt

SEQ ID NO: 126173 - DNA, 25 bp, Homo sapien
ttacggttgtcgtacgacccattgt

SEQ ID NO: 126174 - DNA, 25 bp, Homo sapien
ttacggttgtcgaacgacccattgt

SEQ ID NO: 126175 - DNA, 25 bp, Homo sapien
agtctcggagggaatcctcgcttat

SEQ ID NO: 126176 - DNA, 25 bp, Homo sapien
agtctcggagggtatcctcgcttat

SEQ ID NO: 126177 - DNA, 25 bp, Homo sapien
gaacttaagacgaggacttctccca

SEQ ID NO: 126178 - DNA, 25 bp, Homo sapien
gaacttaagacgtggacttctccca

SEQ ID NO: 126179 - DNA, 25 bp, Homo sapien
tctctatcttgtgacctccgttctt

SEQ ID NO: 126180 - DNA, 25 bp, Homo sapien
tctctatcttgtcacctccgttctt

SEQ ID NO: 126181 - DNA, 25 bp, Homo sapien
ccgtgacgtgctacgcgtccttaca

SEQ ID NO: 126182 - DNA, 25 bp, Homo sapien
ccgtgacgtgcttcgcgtccttaca

SEQ ID NO: 126183 - DNA, 25 bp, Homo sapien
gtccccgaactttgtggttccgtga

SEQ ID NO: 126184 - DNA, 25 bp, Homo sapien
gtccccgaacttagtggttccgtga

SEQ ID NO: 126185 - DNA, 25 bp, Homo sapien
ccactagaatgtaggtcccatgtct

SEQ ID NO: 126186 - DNA, 25 bp, Homo sapien
ccactagaatgttggtcccatgtct

SEQ ID NO: 126187 - DNA, 25 bp, Homo sapien
cctttacaaggtagctaaaaccgtc

SEQ ID NO: 126188 - DNA, 25 bp, Homo sapien
cctttacaaggttgctaaaaccgtc

SEQ ID NO: 126189 - DNA, 25 bp, Homo sapien
gactatgacgtaacggacaaaacag

SEQ ID NO: 126190 - DNA, 25 bp, Homo sapien
gactatgacgtatcggacaaaacag

SEQ ID NO: 126191 - DNA, 25 bp, Homo sapien
aggtggtcggaccttagacagaaag

SEQ ID NO: 126192 - DNA, 25 bp, Homo sapien
aggtggtcggacgttagacagaaag

SEQ ID NO: 126193 - DNA, 25 bp, Homo sapien
agcgactggtggacccacaagaagg

SEQ ID NO: 126194 - DNA, 25 bp, Homo sapien
agcgactggtggtcccacaagaagg

SEQ ID NO: 126195 - DNA, 25 bp, Homo sapien
ggtcttatagcctccgaacgagtgc

SEQ ID NO: 126196 - DNA, 25 bp, Homo sapien
ggtcttatagccaccgaacgagtgc

SEQ ID NO: 126197 - DNA, 25 bp, Homo sapien
gaattttgacctaaactaaagtgtc

SEQ ID NO: 126198 - DNA, 25 bp, Homo sapien
gaattttgaccttaactaaagtgtc

SEQ ID NO: 126199 - DNA, 25 bp, Homo sapien
ggtcgtttctgtcttcactaaattt

SEQ ID NO: 126200 - DNA, 25 bp, Homo sapien
ggtcgtttctgtgttcactaaattt

SEQ ID NO: 126201 - DNA, 25 bp, Homo sapien
ctgttacttcagttgatatgttccg

SEQ ID NO: 126202 - DNA, 25 bp, Homo sapien
ctgttacttcagatgatatgttccg

SEQ ID NO: 126203 - DNA, 25 bp, Homo sapien
gagtcggtggttttctgaaaggccg

SEQ ID NO: 126204 - DNA, 25 bp, Homo sapien
gagtcggtggttatctgaaaggccg

SEQ ID NO: 126205 - DNA, 25 bp, Homo sapien
cccctggaactcctaacaacggaag

SEQ ID NO: 126206 - DNA, 25 bp, Homo sapien
cccctggaactcgtaacaacggaag

SEQ ID NO: 126207 - DNA, 25 bp, Homo sapien
tttctttcaacctatacaagagtgg

SEQ ID NO: 126208 - DNA, 25 bp, Homo sapien
tttctttcaaccaatacaagagtgg

SEQ ID NO: 126209 - DNA, 25 bp, Homo sapien
ttccacacccctcgaccgacgaagg

SEQ ID NO: 126210 - DNA, 25 bp, Homo sapien
ttccacacccctggaccgacgaagg

SEQ ID NO: 126211 - DNA, 25 bp, Homo sapien
cgtcgcgacggtcgacgacaaacag

SEQ ID NO: 126212 - DNA, 25 bp, Homo sapien
cgtcgcgacggtggacgacaaacag

SEQ ID NO: 126213 - DNA, 25 bp, Homo sapien
tggtttagacgtaacgacgatgtac

SEQ ID NO: 126214 - DNA, 25 bp, Homo sapien
tggtttagacgttacgacgatgtac

SEQ ID NO: 126215 - DNA, 25 bp, Homo sapien
aacactttagtgtcgacgatactgt

SEQ ID NO: 126216 - DNA, 25 bp, Homo sapien
aacactttagtgacgacgatactgt

SEQ ID NO: 126217 - DNA, 25 bp, Homo sapien
ctcatcagtccacgtgtacccaatg

SEQ ID NO: 126218 - DNA, 25 bp, Homo sapien
ctcatcagtccaggtgtacccaatg

SEQ ID NO: 126219 - DNA, 25 bp, Homo sapien
gcacagggacccagtgacccaagcg

SEQ ID NO: 126220 - DNA, 25 bp, Homo sapien
gcacagggaccctgtgacccaagcg

SEQ ID NO: 126221 - DNA, 25 bp, Homo sapien
ccgtgggtcccgacaccggagtgtc

SEQ ID NO: 126222 - DNA, 25 bp, Homo sapien
ccgtgggtcccgtcaccggagtgtc

SEQ ID NO: 126223 - DNA, 25 bp, Homo sapien
cttctggtcccgacaccgaggtcga

SEQ ID NO: 126224 - DNA, 25 bp, Homo sapien
cttctggtcccgtcaccgaggtcga

SEQ ID NO: 126225 - DNA, 25 bp, Homo sapien
ctcggtcgcacgtccgtaccgggtg

SEQ ID NO: 126226 - DNA, 25 bp, Homo sapien
ctcggtcgcacgaccgtaccgggtg

SEQ ID NO: 126227 - DNA, 25 bp, Homo sapien
tcctcggacctggacgagaaggtgt

SEQ ID NO: 126228 - DNA, 25 bp, Homo sapien
tcctcggacctgcacgagaaggtgt

SEQ ID NO: 126229 - DNA, 25 bp, Homo sapien
taccgagtcggctccagagaaggtt

SEQ ID NO: 126230 - DNA, 25 bp, Homo sapien
taccgagtcggcaccagagaaggtt

SEQ ID NO: 126231 - DNA, 25 bp, Homo sapien
cagaaaccacagatacggacactgt

SEQ ID NO: 126232 - DNA, 25 bp, Homo sapien
cagaaaccacagttacggacactgt

SEQ ID NO: 126233 - DNA, 25 bp, Homo sapien
cgtcgcaacgccagcgtcaacgttt

SEQ ID NO: 126234 - DNA, 25 bp, Homo sapien
cgtcgcaacgcctgcgtcaacgttt

SEQ ID NO: 126235 - DNA, 25 bp, Homo sapien
cgttccacctctaagtgtcttaagt

SEQ ID NO: 126236 - DNA, 25 bp, Homo sapien
cgttccacctcttagtgtcttaagt

SEQ ID NO: 126237 - DNA, 25 bp, Homo sapien
taacttcccatgttaggcgtaggtt

SEQ ID NO: 126238 - DNA, 25 bp, Homo sapien
taacttcccatgataggcgtaggtt

SEQ ID NO: 126239 - DNA, 25 bp, Homo sapien
ctgccctaccgatcatggatatctt

SEQ ID NO: 126240 - DNA, 25 bp, Homo sapien
ctgccctaccgaacatggatatctt

SEQ ID NO: 126241 - DNA, 25 bp, Homo sapien
cctgttctacggaaaaaacgtcctc

SEQ ID NO: 126242 - DNA, 25 bp, Homo sapien
cctgttctacggtaaaaacgtcctc

SEQ ID NO: 126243 - DNA, 25 bp, Homo sapien
aacttattccggacgaagaggtacc

SEQ ID NO: 126244 - DNA, 25 bp, Homo sapien
aacttattccggtcgaagaggtacc

SEQ ID NO: 126245 - DNA, 25 bp, Homo sapien
tttatatagcggtgagacgtaggcc

SEQ ID NO: 126246 - DNA, 25 bp, Homo sapien
tttatatagcggagagacgtaggcc

SEQ ID NO: 126247 - DNA, 25 bp, Homo sapien
aatatttaccgagactatgttcgac

SEQ ID NO: 126248 - DNA, 25 bp, Homo sapien
aatatttaccgacactatgttcgac

SEQ ID NO: 126249 - DNA, 25 bp, Homo sapien
gaaagtacgtttaaatccctggttt

SEQ ID NO: 126250 - DNA, 25 bp, Homo sapien
gaaagtacgttttaatccctggttt

SEQ ID NO: 126251 - DNA, 25 bp, Homo sapien
taagaactatttgttcgatgagcct

SEQ ID NO: 126252 - DNA, 25 bp, Homo sapien
taagaactatttcttcgatgagcct

SEQ ID NO: 126253 - DNA, 25 bp, Homo sapien
tacaatgtattaatcttgggacttc

SEQ ID NO: 126254 - DNA, 25 bp, Homo sapien
tacaatgtattattcttgggacttc

SEQ ID NO: 126255 - DNA, 25 bp, Homo sapien
tgtctgttacgtcatgagtcgggaa

SEQ ID NO: 126256 - DNA, 25 bp, Homo sapien
tgtctgttacgtgatgagtcgggaa

SEQ ID NO: 126257 - DNA, 25 bp, Homo sapien
gtctttcgtttcagtatcgatacgg

SEQ ID NO: 126258 - DNA, 25 bp, Homo sapien
gtctttcgtttctgtatcgatacgg

SEQ ID NO: 126259 - DNA, 25 bp, Homo sapien
tacttgtctcgactacagtctatgt

SEQ ID NO: 126260 - DNA, 25 bp, Homo sapien
tacttgtctcgagtacagtctatgt

SEQ ID NO: 126261 - DNA, 25 bp, Homo sapien
gtatctgagtcaatattacgtcgta

SEQ ID NO: 126262 - DNA, 25 bp, Homo sapien
gtatctgagtcattattacgtcgta

SEQ ID NO: 126263 - DNA, 25 bp, Homo sapien
agagactcgaccagtctgttgtaga

SEQ ID NO: 126264 - DNA, 25 bp, Homo sapien
agagactcgacctgtctgttgtaga

SEQ ID NO: 126265 - DNA, 25 bp, Homo sapien
gtttgaaaccaccttgtccactgac

SEQ ID NO: 126266 - DNA, 25 bp, Homo sapien
gtttgaaaccacgttgtccactgac

SEQ ID NO: 126267 - DNA, 25 bp, Homo sapien
gtattgaagccgaagatcttgcaga

SEQ ID NO: 126268 - DNA, 25 bp, Homo sapien
gtattgaagccgtagatcttgcaga

SEQ ID NO: 126269 - DNA, 25 bp, Homo sapien
gtttcgaggctaaggttctttacaa

SEQ ID NO: 126270 - DNA, 25 bp, Homo sapien
gtttcgaggctatggttctttacaa

SEQ ID NO: 126271 - DNA, 25 bp, Homo sapien
ggtccggactgcaaatctcttccaa

SEQ ID NO: 126272 - DNA, 25 bp, Homo sapien
ggtccggactgctaatctcttccaa

SEQ ID NO: 126273 - DNA, 25 bp, Homo sapien
tggataggtccataacttccccaag

SEQ ID NO: 126274 - DNA, 25 bp, Homo sapien
tggataggtccaaaacttccccaag

SEQ ID NO: 126275 - DNA, 25 bp, Homo sapien
ggaatctgaccaaaagacctcctta

SEQ ID NO: 126276 - DNA, 25 bp, Homo sapien
ggaatctgaccataagacctcctta

SEQ ID NO: 126277 - DNA, 25 bp, Homo sapien
cgatagtctcttacacgaaacttga

SEQ ID NO: 126278 - DNA, 25 bp, Homo sapien
cgatagtctctttcacgaaacttga

SEQ ID NO: 126279 - DNA, 25 bp, Homo sapien
tttagaccctcgagtccctgaccgt

SEQ ID NO: 126280 - DNA, 25 bp, Homo sapien
tttagaccctcgtgtccctgaccgt

SEQ ID NO: 126281 - DNA, 25 bp, Homo sapien
cgggactctcacacaggacaggtcg

SEQ ID NO: 126282 - DNA, 25 bp, Homo sapien
cgggactctcactcaggacaggtcg

SEQ ID NO: 126283 - DNA, 25 bp, Homo sapien
acctttccgtcgagagacaccggtc

SEQ ID NO: 126284 - DNA, 25 bp, Homo sapien
acctttccgtcgtgagacaccggtc

SEQ ID NO: 126285 - DNA, 25 bp, Homo sapien
actaattcttctgagaacgttggtt

SEQ ID NO: 126286 - DNA, 25 bp, Homo sapien
actaattcttctcagaacgttggtt

SEQ ID NO: 126287 - DNA, 25 bp, Homo sapien
agagaatcctttaccactctcggta

SEQ ID NO: 126288 - DNA, 25 bp, Homo sapien
agagaatccttttccactctcggta

SEQ ID NO: 126289 - DNA, 25 bp, Homo sapien
catattcctttgtctagtcgacgtc

SEQ ID NO: 126290 - DNA, 25 bp, Homo sapien
catattcctttgactagtcgacgtc

SEQ ID NO: 126291 - DNA, 25 bp, Homo sapien
ccctttagtccctcgaacgtgtcaa

SEQ ID NO: 126292 - DNA, 25 bp, Homo sapien
ccctttagtcccacgaacgtgtcaa

SEQ ID NO: 126293 - DNA, 25 bp, Homo sapien
attgtgttcacagacggtacagtag

SEQ ID NO: 126294 - DNA, 25 bp, Homo sapien
attgtgttcacacacggtacagtag

SEQ ID NO: 126295 - DNA, 25 bp, Homo sapien
tactctcgtgacatatcttgacaag

SEQ ID NO: 126296 - DNA, 25 bp, Homo sapien
tactctcgtgacttatcttgacaag

SEQ ID NO: 126297 - DNA, 25 bp, Homo sapien
aacaaagtagggttcttgtcagtcg

SEQ ID NO: 126298 - DNA, 25 bp, Homo sapien
aacaaagtagggatcttgtcagtcg

SEQ ID NO: 126299 - DNA, 25 bp, Homo sapien
gaccctaaagggtgtctaccgtgtc

SEQ ID NO: 126300 - DNA, 25 bp, Homo sapien
gaccctaaagggagtctaccgtgtc

SEQ ID NO: 126301 - DNA, 25 bp, Homo sapien
cactccgtaaaggagggtcaccgaa

SEQ ID NO: 126302 - DNA, 25 bp, Homo sapien
cactccgtaaagcagggtcaccgaa

SEQ ID NO: 126303 - DNA, 25 bp, Homo sapien
cagtagtggtgtcaaacaccgtctc

SEQ ID NO: 126304 - DNA, 25 bp, Homo sapien
cagtagtggtgtgaaacaccgtctc

SEQ ID NO: 126305 - DNA, 25 bp, Homo sapien
agacccggtgtaggacccgtcggtt

SEQ ID NO: 126306 - DNA, 25 bp, Homo sapien
agacccggtgtacgacccgtcggtt

SEQ ID NO: 126307 - DNA, 25 bp, Homo sapien
ttaacctaccggtcagtcactggtt

SEQ ID NO: 126308 - DNA, 25 bp, Homo sapien
ttaacctaccggacagtcactggtt

SEQ ID NO: 126309 - DNA, 25 bp, Homo sapien
ttaagacccagtgaaagtccccgtc

SEQ ID NO: 126310 - DNA, 25 bp, Homo sapien
ttaagacccagtcaaagtccccgtc

SEQ ID NO: 126311 - DNA, 25 bp, Homo sapien
acggacacccatgaagtcgtggtcc

SEQ ID NO: 126312 - DNA, 25 bp, Homo sapien
acggacacccatcaagtcgtggtcc

SEQ ID NO: 126313 - DNA, 25 bp, Homo sapien
tttccgaacccgtttgtgttgataa

SEQ ID NO: 126314 - DNA, 25 bp, Homo sapien
tttccgaacccgattgtgttgataa

SEQ ID NO: 126315 - DNA, 25 bp, Homo sapien
acccagtaccttaatgttatgttaa

SEQ ID NO: 126316 - DNA, 25 bp, Homo sapien
acccagtacctttatgttatgttaa

SEQ ID NO: 126317 - DNA, 25 bp, Homo sapien
tccaagacttagtatcaagttcagt

SEQ ID NO: 126318 - DNA, 25 bp, Homo sapien
tccaagacttagaatcaagttcagt

SEQ ID NO: 126319 - DNA, 25 bp, Homo sapien
cagggacctcggactcggtctcagt

SEQ ID NO: 126320 - DNA, 25 bp, Homo sapien
cagggacctcggtctcggtctcagt

SEQ ID NO: 126321 - DNA, 25 bp, Homo sapien
tatgtcgactggacccgtgtaacac

SEQ ID NO: 126322 - DNA, 25 bp, Homo sapien
tatgtcgactggtcccgtgtaacac

SEQ ID NO: 126323 - DNA, 25 bp, Homo sapien
taaagactcggttagaccagtcaga

SEQ ID NO: 126324 - DNA, 25 bp, Homo sapien
taaagactcggtaagaccagtcaga

SEQ ID NO: 126325 - DNA, 25 bp, Homo sapien
tactatgttatgacgtagcacccta

SEQ ID NO: 126326 - DNA, 25 bp, Homo sapien
tactatgttatgtcgtagcacccta

SEQ ID NO: 126327 - DNA, 25 bp, Homo sapien
cacaatgtatgtgtcgtgccccgag

SEQ ID NO: 126328 - DNA, 25 bp, Homo sapien
cacaatgtatgtctcgtgccccgag

SEQ ID NO: 126329 - DNA, 25 bp, Homo sapien
aatagctgtttttcgcgcgcgtcca

SEQ ID NO: 126330 - DNA, 25 bp, Homo sapien
aatagctgttttacgcgcgcgtcca

SEQ ID NO: 126331 - DNA, 25 bp, Homo sapien
cacgataaatatgttgacttcttga

SEQ ID NO: 126332 - DNA, 25 bp, Homo sapien
cacgataaatatcttgacttcttga

SEQ ID NO: 126333 - DNA, 25 bp, Homo sapien
aacagaagtcccaacaacgtctagg

SEQ ID NO: 126334 - DNA, 25 bp, Homo sapien
aacagaagtccctacaacgtctagg

SEQ ID NO: 126335 - DNA, 25 bp, Homo sapien
aaccagaaacgtttccaagagactg

SEQ ID NO: 126336 - DNA, 25 bp, Homo sapien
aaccagaaacgtatccaagagactg

SEQ ID NO: 126337 - DNA, 25 bp, Homo sapien
gacgaggaatcgaaactcaagaaga

SEQ ID NO: 126338 - DNA, 25 bp, Homo sapien
gacgaggaatcgtaactcaagaaga

SEQ ID NO: 126339 - DNA, 25 bp, Homo sapien
gggaacaagaccagaccctccgaga

SEQ ID NO: 126340 - DNA, 25 bp, Homo sapien
gggaacaagacctgaccctccgaga

SEQ ID NO: 126341 - DNA, 25 bp, Homo sapien
gagtttattaagttaccctgttgac

SEQ ID NO: 126342 - DNA, 25 bp, Homo sapien
gagtttattaagataccctgttgac

SEQ ID NO: 126343 - DNA, 25 bp, Homo sapien
cttcttattgaaacgctctagtgga

SEQ ID NO: 126344 - DNA, 25 bp, Homo sapien
cttcttattgaatcgctctagtgga

SEQ ID NO: 126345 - DNA, 25 bp, Homo sapien
cgtgttttatagaacctttagatca

SEQ ID NO: 126346 - DNA, 25 bp, Homo sapien
cgtgttttatagtacctttagatca

SEQ ID NO: 126347 - DNA, 25 bp, Homo sapien
gtttctatagaaccttcagtctcag

SEQ ID NO: 126348 - DNA, 25 bp, Homo sapien
gtttctatagaagcttcagtctcag

SEQ ID NO: 126349 - DNA, 25 bp, Homo sapien
tggtttaagttgaatacttttatta

SEQ ID NO: 126350 - DNA, 25 bp, Homo sapien
tggtttaagttgtatacttttatta

SEQ ID NO: 126351 - DNA, 25 bp, Homo sapien
tgtatcaatctagtcccttaagaag

SEQ ID NO: 126352 - DNA, 25 bp, Homo sapien
tgtatcaatctactcccttaagaag

SEQ ID NO: 126353 - DNA, 25 bp, Homo sapien
ttccgagttactttcctattagagg

SEQ ID NO: 126354 - DNA, 25 bp, Homo sapien
ttccgagttactatcctattagagg

SEQ ID NO: 126355 - DNA, 25 bp, Homo sapien
ttcaacgtctcgttaccccttaagg

SEQ ID NO: 126356 - DNA, 25 bp, Homo sapien
ttcaacgtctcgataccccttaagg

SEQ ID NO: 126357 - DNA, 25 bp, Homo sapien
gatcaatctgtgaaccttcttgacc

SEQ ID NO: 126358 - DNA, 25 bp, Homo sapien
gatcaatctgtgtaccttcttgacc

SEQ ID NO: 126359 - DNA, 25 bp, Homo sapien
atatcgtgttctgaagtgtttacac

SEQ ID NO: 126360 - DNA, 25 bp, Homo sapien
atatcgtgttctcaagtgtttacac

SEQ ID NO: 126361 - DNA, 25 bp, Homo sapien
gttcatttgtcaatatagtttccac

SEQ ID NO: 126362 - DNA, 25 bp, Homo sapien
gttcatttgtcattatagtttccac

SEQ ID NO: 126363 - DNA, 25 bp, Homo sapien
tagatgtacgtctttgactttgtac

SEQ ID NO: 126364 - DNA, 25 bp, Homo sapien
tagatgtacgtcattgactttgtac

SEQ ID NO: 126365 - DNA, 25 bp, Homo sapien
cgtagatttctatgtgtatcttaac

SEQ ID NO: 126366 - DNA, 25 bp, Homo sapien
cgtagatttctaagtgtatcttaac

SEQ ID NO: 126367 - DNA, 25 bp, Homo sapien
acgagtgattctatttacgtctaga

SEQ ID NO: 126368 - DNA, 25 bp, Homo sapien
acgagtgattctttttacgtctaga

SEQ ID NO: 126369 - DNA, 25 bp, Homo sapien
ttccagagctcaatttagctcttac

SEQ ID NO: 126370 - DNA, 25 bp, Homo sapien
ttccagagctcattttagctcttac

SEQ ID NO: 126371 - DNA, 25 bp, Homo sapien
tgtactacccgtcttagaagcgacg

SEQ ID NO: 126372 - DNA, 25 bp, Homo sapien
tgtactacccgtgttagaagcgacg

SEQ ID NO: 126373 - DNA, 25 bp, Homo sapien
tttttgcggccgaagacgttgtacg

SEQ ID NO: 126374 - DNA, 25 bp, Homo sapien
tttttgcggccgtagacgttgtacg

SEQ ID NO: 126375 - DNA, 25 bp, Homo sapien
caaacgaagagtcgttatcttgtgg

SEQ ID NO: 126376 - DNA, 25 bp, Homo sapien
caaacgaagagtggttatcttgtgg

SEQ ID NO: 126377 - DNA, 25 bp, Homo sapien
cctgagtctgtgaggttaatgttct

SEQ ID NO: 126378 - DNA, 25 bp, Homo sapien
cctgagtctgtgtggttaatgttct

SEQ ID NO: 126379 - DNA, 25 bp, Homo sapien
tcttctagagagtttctattagtct

SEQ ID NO: 126380 - DNA, 25 bp, Homo sapien
tcttctagagagattctattagtct

SEQ ID NO: 126381 - DNA, 25 bp, Homo sapien
ccgaagtgtgtctacactagttatt

SEQ ID NO: 126382 - DNA, 25 bp, Homo sapien
ccgaagtgtgtcaacactagttatt

SEQ ID NO: 126383 - DNA, 25 bp, Homo sapien
ttctcatatgttcgtacaagttgtt

SEQ ID NO: 126384 - DNA, 25 bp, Homo sapien
ttctcatatgttggtacaagttgtt

SEQ ID NO: 126385 - DNA, 25 bp, Homo sapien
gaaccttatgtaacggcaagtttag

SEQ ID NO: 126386 - DNA, 25 bp, Homo sapien
gaaccttatgtatcggcaagtttag

SEQ ID NO: 126387 - DNA, 25 bp, Homo sapien
acatctgtagtgatttcagatctaa

SEQ ID NO: 126388 - DNA, 25 bp, Homo sapien
acatctgtagtgttttcagatctaa

SEQ ID NO: 126389 - DNA, 25 bp, Homo sapien
cttcgacactacagtcacggttgag

SEQ ID NO: 126390 - DNA, 25 bp, Homo sapien
cttcgacactactgtcacggttgag

SEQ ID NO: 126391 - DNA, 25 bp, Homo sapien
atgactcacggctgatacgttcgag

SEQ ID NO: 126392 - DNA, 25 bp, Homo sapien
atgactcacggcagatacgttcgag

SEQ ID NO: 126393 - DNA, 25 bp, Homo sapien
cgtttaacaccaggtacccgatttg

SEQ ID NO: 126394 - DNA, 25 bp, Homo sapien
cgtttaacaccacgtacccgatttg

SEQ ID NO: 126395 - DNA, 25 bp, Homo sapien
ctttcatggtcttctgttcgttgac

SEQ ID NO: 126396 - DNA, 25 bp, Homo sapien
ctttcatggtctactgttcgttgac

SEQ ID NO: 126397 - DNA, 25 bp, Homo sapien
tcgtcctgggtttcggcaagtgtgc

SEQ ID NO: 126398 - DNA, 25 bp, Homo sapien
tcgtcctgggttacggcaagtgtgc

SEQ ID NO: 126399 - DNA, 25 bp, Homo sapien
cctgtgtcgtgacggcaggagacgc

SEQ ID NO: 126400 - DNA, 25 bp, Homo sapien
cctgtgtcgtgagggcaggagacgc

SEQ ID NO: 126401 - DNA, 25 bp, Homo sapien
gcccggacgtgagacccagagcgtc

SEQ ID NO: 126402 - DNA, 25 bp, Homo sapien
gcccggacgtgacacccagagcgtc

SEQ ID NO: 126403 - DNA, 25 bp, Homo sapien
ccctatgtcgaaagaacccctcgtt

SEQ ID NO: 126404 - DNA, 25 bp, Homo sapien
ccctatgtcgaatgaacccctcgtt

SEQ ID NO: 126405 - DNA, 25 bp, Homo sapien
tacaagtcgtaatgggttatacccc

SEQ ID NO: 126406 - DNA, 25 bp, Homo sapien
tacaagtcgtaaagggttatacccc

SEQ ID NO: 126407 - DNA, 25 bp, Homo sapien
atagaaaaatgcatttactcactgt

SEQ ID NO: 126408 - DNA, 25 bp, Homo sapien
atagaaaaatgcttttactcactgt

SEQ ID NO: 126409 - DNA, 25 bp, Homo sapien
tatcaaaaccgtgtccagtgtagaa

SEQ ID NO: 126410 - DNA, 25 bp, Homo sapien
tatcaaaaccgtctccagtgtagaa

SEQ ID NO: 126411 - DNA, 25 bp, Homo sapien
tagtctaaaacgtccacaagttgga

SEQ ID NO: 126412 - DNA, 25 bp, Homo sapien
tagtctaaaacgaccacaagttgga

SEQ ID NO: 126413 - DNA, 25 bp, Homo sapien
aaagtgtaacctcgataatactaaa

SEQ ID NO: 126414 - DNA, 25 bp, Homo sapien
aaagtgtaacctggataatactaaa

SEQ ID NO: 126415 - DNA, 25 bp, Homo sapien
agacttggaccagatatataacaca

SEQ ID NO: 126416 - DNA, 25 bp, Homo sapien
agacttggaccacatatataacaca

SEQ ID NO: 126417 - DNA, 25 bp, Homo sapien
aacagtcatcccacgtgattacagt

SEQ ID NO: 126418 - DNA, 25 bp, Homo sapien
aacagtcatccctcgtgattacagt

SEQ ID NO: 126419 - DNA, 25 bp, Homo sapien
gaacagttagtgcacccgagcttca

SEQ ID NO: 126420 - DNA, 25 bp, Homo sapien
gaacagttagtggacccgagcttca

SEQ ID NO: 126421 - DNA, 25 bp, Homo sapien
gaagactccgtcacccgagctgcgg

SEQ ID NO: 126422 - DNA, 25 bp, Homo sapien
gaagactccgtctcccgagctgcgg

SEQ ID NO: 126423 - DNA, 25 bp, Homo sapien
aaaagacccctcgtggcgtccgagg

SEQ ID NO: 126424 - DNA, 25 bp, Homo sapien
aaaagacccctcctggcgtccgagg

SEQ ID NO: 126425 - DNA, 25 bp, Homo sapien
atatgtttccggtagagatcccgtc

SEQ ID NO: 126426 - DNA, 25 bp, Homo sapien
atatgtttccggaagagatcccgtc

SEQ ID NO: 126427 - DNA, 25 bp, Homo sapien
ctctccgacgtaacggacggtccag

SEQ ID NO: 126428 - DNA, 25 bp, Homo sapien
ctctccgacgtatcggacggtccag

SEQ ID NO: 126429 - DNA, 25 bp, Homo sapien
gaaagaccggaaatcccctcagagt

SEQ ID NO: 126430 - DNA, 25 bp, Homo sapien
gaaagaccggaattcccctcagagt

SEQ ID NO: 126431 - DNA, 25 bp, Homo sapien
caaaagactcggtggaaagtcttgg

SEQ ID NO: 126432 - DNA, 25 bp, Homo sapien
caaaagactcggaggaaagtcttgg

SEQ ID NO: 126433 - DNA, 25 bp, Homo sapien
tgagaaccccaatgattttatcgac

SEQ ID NO: 126434 - DNA, 25 bp, Homo sapien
tgagaaccccaaagattttatcgac

SEQ ID NO: 126435 - DNA, 25 bp, Homo sapien
ttgaacagggagaatatgacccgca

SEQ ID NO: 126436 - DNA, 25 bp, Homo sapien
ttgaacagggagtatatgacccgca

SEQ ID NO: 126437 - DNA, 25 bp, Homo sapien
caaaacgagagatacctggtctcga

SEQ ID NO: 126438 - DNA, 25 bp, Homo sapien
caaaacgagagaaacctggtctcga

SEQ ID NO: 126439 - DNA, 25 bp, Homo sapien
gacggaaggtcgaaccacccgttgg

SEQ ID NO: 126440 - DNA, 25 bp, Homo sapien
gacggaaggtcgtaccacccgttgg

SEQ ID NO: 126441 - DNA, 25 bp, Homo sapien
tgaggaaggccagacccgactgagt

SEQ ID NO: 126442 - DNA, 25 bp, Homo sapien
tgaggaaggccacacccgactgagt

SEQ ID NO: 126443 - DNA, 25 bp, Homo sapien
aagtggtgcaccatcccgtcggtct

SEQ ID NO: 126444 - DNA, 25 bp, Homo sapien
aagtggtgcaccttcccgtcggtct

SEQ ID NO: 126445 - DNA, 25 bp, Homo sapien
gtcatgacatctgatccgtctctct

SEQ ID NO: 126446 - DNA, 25 bp, Homo sapien
gtcatgacatctcatccgtctctct

SEQ ID NO: 126447 - DNA, 25 bp, Homo sapien
atgggaacctcctacgtagtcacct

SEQ ID NO: 126448 - DNA, 25 bp, Homo sapien
atgggaacctccaacgtagtcacct

SEQ ID NO: 126449 - DNA, 25 bp, Homo sapien
atctgtgactaaaaccggtgcctct

SEQ ID NO: 126450 - DNA, 25 bp, Homo sapien
atctgtgactaataccggtgcctct

SEQ ID NO: 126451 - DNA, 25 bp, Homo sapien
cgtgctactcgaatctacctgcctt

SEQ ID NO: 126452 - DNA, 25 bp, Homo sapien
cgtgctactcgattctacctgcctt

SEQ ID NO: 126453 - DNA, 25 bp, Homo sapien
gactcaagtgacaccgtccgtcctt

SEQ ID NO: 126454 - DNA, 25 bp, Homo sapien
gactcaagtgactccgtccgtcctt

SEQ ID NO: 126455 - DNA, 25 bp, Homo sapien
gagaacgggtccagtcttcctgcac

SEQ ID NO: 126456 - DNA, 25 bp, Homo sapien
gagaacgggtcctgtcttcctgcac

SEQ ID NO: 126457 - DNA, 25 bp, Homo sapien
gggaccgtgtcttcccaactcgtac

SEQ ID NO: 126458 - DNA, 25 bp, Homo sapien
gggaccgtgtctacccaactcgtac

SEQ ID NO: 126459 - DNA, 25 bp, Homo sapien
tcttacataagagaccacccgtagt

SEQ ID NO: 126460 - DNA, 25 bp, Homo sapien
tcttacataagacaccacccgtagt

SEQ ID NO: 126461 - DNA, 25 bp, Homo sapien
gtcgtccaaagaagaaccatctgtc

SEQ ID NO: 126462 - DNA, 25 bp, Homo sapien
gtcgtccaaagatgaaccatctgtc

SEQ ID NO: 126463 - DNA, 25 bp, Homo sapien
accggaccataggtgccacgttcca

SEQ ID NO: 126464 - DNA, 25 bp, Homo sapien
accggaccatagctgccacgttcca

SEQ ID NO: 126465 - DNA, 25 bp, Homo sapien
gaagaccataacaggtaaactctcc

SEQ ID NO: 126466 - DNA, 25 bp, Homo sapien
gaagaccataactggtaaactctcc

SEQ ID NO: 126467 - DNA, 25 bp, Homo sapien
agtatgaggtgcaccgttaactttc

SEQ ID NO: 126468 - DNA, 25 bp, Homo sapien
agtatgaggtgctccgttaactttc

SEQ ID NO: 126469 - DNA, 25 bp, Homo sapien
aaagggtcctatagatagtcgtatc

SEQ ID NO: 126470 - DNA, 25 bp, Homo sapien
aaagggtcctattgatagtcgtatc

SEQ ID NO: 126471 - DNA, 25 bp, Homo sapien
ctctatgttttctgtgaagttcgat

SEQ ID NO: 126472 - DNA, 25 bp, Homo sapien
ctctatgttttcagtgaagttcgat

SEQ ID NO: 126473 - DNA, 25 bp, Homo sapien
gttacggactcattggaatttaaac

SEQ ID NO: 126474 - DNA, 25 bp, Homo sapien
gttacggactcaatggaatttaaac

SEQ ID NO: 126475 - DNA, 25 bp, Homo sapien
gaaactgtcgtgtgataacttacaa

SEQ ID NO: 126476 - DNA, 25 bp, Homo sapien
gaaactgtcgtgagataacttacaa

SEQ ID NO: 126477 - DNA, 25 bp, Homo sapien
gatcggtgtcgtcattaattctaat

SEQ ID NO: 126478 - DNA, 25 bp, Homo sapien
gatcggtgtcgtgattaattctaat

SEQ ID NO: 126479 - DNA, 25 bp, Homo sapien
atctatagagactcagtgaaattca

SEQ ID NO: 126480 - DNA, 25 bp, Homo sapien
atctatagagacacagtgaaattca

SEQ ID NO: 126481 - DNA, 25 bp, Homo sapien
gttcagccacaggtatatacgttga

SEQ ID NO: 126482 - DNA, 25 bp, Homo sapien
gttcagccacagctatatacgttga

SEQ ID NO: 126483 - DNA, 25 bp, Homo sapien
ctaccggacccactaagtaccgaag

SEQ ID NO: 126484 - DNA, 25 bp, Homo sapien
ctaccggacccagtaagtaccgaag

SEQ ID NO: 126485 - DNA, 25 bp, Homo sapien
catgaattagtacacgaactaaacg

SEQ ID NO: 126486 - DNA, 25 bp, Homo sapien
catgaattagtagacgaactaaacg

SEQ ID NO: 126487 - DNA, 25 bp, Homo sapien
ggacacgtgacaccacgacctaagg

SEQ ID NO: 126488 - DNA, 25 bp, Homo sapien
ggacacgtgacagcacgacctaagg

SEQ ID NO: 126489 - DNA, 25 bp, Homo sapien
tgtatcctccgacgtccttagtcgt

SEQ ID NO: 126490 - DNA, 25 bp, Homo sapien
tgtatcctccgaggtccttagtcgt

SEQ ID NO: 126491 - DNA, 25 bp, Homo sapien
ggtagttcctaagagacatactaat

SEQ ID NO: 126492 - DNA, 25 bp, Homo sapien
ggtagttcctaacagacatactaat

SEQ ID NO: 126493 - DNA, 25 bp, Homo sapien
ttaaatttcgcaaaacacgtgattg

SEQ ID NO: 126494 - DNA, 25 bp, Homo sapien
ttaaatttcgcataacacgtgattg

SEQ ID NO: 126495 - DNA, 25 bp, Homo sapien
gtttgattacttaaagttcccattg

SEQ ID NO: 126496 - DNA, 25 bp, Homo sapien
gtttgattactttaagttcccattg

SEQ ID NO: 126497 - DNA, 25 bp, Homo sapien
ctgtttattcgtaggtgtgtccttc

SEQ ID NO: 126498 - DNA, 25 bp, Homo sapien
ctgtttattcgttggtgtgtccttc

SEQ ID NO: 126499 - DNA, 25 bp, Homo sapien
gtagtgtttctttctacgacccacc

SEQ ID NO: 126500 - DNA, 25 bp, Homo sapien
gtagtgtttcttactacgacccacc

SEQ ID NO: 126501 - DNA, 25 bp, Homo sapien
ttggagtgttgcacgcgcgcgtcaa

SEQ ID NO: 126502 - DNA, 25 bp, Homo sapien
ttggagtgttgctcgcgcgcgtcaa

SEQ ID NO: 126503 - DNA, 25 bp, Homo sapien
tcctacggtccctcctgagtgacta

SEQ ID NO: 126504 - DNA, 25 bp, Homo sapien
tcctacggtcccacctgagtgacta

SEQ ID NO: 126505 - DNA, 25 bp, Homo sapien
cgccggtcgccgtttcaatgcacgt

SEQ ID NO: 126506 - DNA, 25 bp, Homo sapien
cgccggtcgccgattcaatgcacgt

SEQ ID NO: 126507 - DNA, 25 bp, Homo sapien
ttgcgacggccaaaccaatatacat

SEQ ID NO: 126508 - DNA, 25 bp, Homo sapien
ttgcgacggccataccaatatacat

SEQ ID NO: 126509 - DNA, 25 bp, Homo sapien
ccttcggggacagtgaggaaccctg

SEQ ID NO: 126510 - DNA, 25 bp, Homo sapien
ccttcggggacactgaggaaccctg

SEQ ID NO: 126511 - DNA, 25 bp, Homo sapien
ccgagtcggaaaccagtggtccccg

SEQ ID NO: 126512 - DNA, 25 bp, Homo sapien
ccgagtcggaaagcagtggtccccg

SEQ ID NO: 126513 - DNA, 25 bp, Homo sapien
ctgttggaaacgattgaggtccgag

SEQ ID NO: 126514 - DNA, 25 bp, Homo sapien
ctgttggaaacgtttgaggtccgag

SEQ ID NO: 126515 - DNA, 25 bp, Homo sapien
atgtctgtagaattctattgaaccc

SEQ ID NO: 126516 - DNA, 25 bp, Homo sapien
atgtctgtagaaatctattgaaccc

SEQ ID NO: 126517 - DNA, 25 bp, Homo sapien
gtccgtgaacatctctaaacaccgg

SEQ ID NO: 126518 - DNA, 25 bp, Homo sapien
gtccgtgaacatgtctaaacaccgg

SEQ ID NO: 126519 - DNA, 25 bp, Homo sapien
atgaacgaccgttcggccaaaggag

SEQ ID NO: 126520 - DNA, 25 bp, Homo sapien
atgaacgaccgtacggccaaaggag

SEQ ID NO: 126521 - DNA, 25 bp, Homo sapien
acttcggaacacctctgaggacgga

SEQ ID NO: 126522 - DNA, 25 bp, Homo sapien
acttcggaacacgtctgaggacgga

SEQ ID NO: 126523 - DNA, 25 bp, Homo sapien
ttctttagcctctagtctccgggcc

SEQ ID NO: 126524 - DNA, 25 bp, Homo sapien
ttctttagcctcaagtctccgggcc

SEQ ID NO: 126525 - DNA, 25 bp, Homo sapien
gattttaaagaaggacccggtcgcc

SEQ ID NO: 126526 - DNA, 25 bp, Homo sapien
gattttaaagaacgacccggtcgcc

SEQ ID NO: 126527 - DNA, 25 bp, Homo sapien
gatgtaagtttcatgcccataaact

SEQ ID NO: 126528 - DNA, 25 bp, Homo sapien
gatgtaagtttcttgcccataaact

SEQ ID NO: 126529 - DNA, 25 bp, Homo sapien
gtctgtagttttctcctaactatat

SEQ ID NO: 126530 - DNA, 25 bp, Homo sapien
gtctgtagttttgtcctaactatat

SEQ ID NO: 126531 - DNA, 25 bp, Homo sapien
cacggaggtataagaccctcttctt

SEQ ID NO: 126532 - DNA, 25 bp, Homo sapien
cacggaggtatatgaccctcttctt

SEQ ID NO: 126533 - DNA, 25 bp, Homo sapien
tatcaagagtatcagccaccggtcc

SEQ ID NO: 126534 - DNA, 25 bp, Homo sapien
tatcaagagtatgagccaccggtcc

SEQ ID NO: 126535 - DNA, 25 bp, Homo sapien
gtttcagtatgtccacctacagtcc

SEQ ID NO: 126536 - DNA, 25 bp, Homo sapien
gtttcagtatgtgcacctacagtcc

SEQ ID NO: 126537 - DNA, 25 bp, Homo sapien
gtaatctgtcggtgtcacagagtcc

SEQ ID NO: 126538 - DNA, 25 bp, Homo sapien
gtaatctgtcggagtcacagagtcc

SEQ ID NO: 126539 - DNA, 25 bp, Homo sapien
gtgacttgtggtggagaccctacta

SEQ ID NO: 126540 - DNA, 25 bp, Homo sapien
gtgacttgtggtcgagaccctacta

SEQ ID NO: 126541 - DNA, 25 bp, Homo sapien
aggagtttgggtagagatcacctac

SEQ ID NO: 126542 - DNA, 25 bp, Homo sapien
aggagtttgggttgagatcacctac

SEQ ID NO: 126543 - DNA, 25 bp, Homo sapien
cgggacttccagggtggaggccacg

SEQ ID NO: 126544 - DNA, 25 bp, Homo sapien
cgggacttccagcgtggaggccacg

SEQ ID NO: 126545 - DNA, 25 bp, Homo sapien
aacgagacctcgagccgaaggggca

SEQ ID NO: 126546 - DNA, 25 bp, Homo sapien
aacgagacctcgtgccgaaggggca

SEQ ID NO: 126547 - DNA, 25 bp, Homo sapien
ggatccctcctaaaggtacagtcga

SEQ ID NO: 126548 - DNA, 25 bp, Homo sapien
ggatccctcctataggtacagtcga

SEQ ID NO: 126549 - DNA, 25 bp, Homo sapien
tggttgatcgtctacaagaaagacc

SEQ ID NO: 126550 - DNA, 25 bp, Homo sapien
tggttgatcgtcaacaagaaagacc

SEQ ID NO: 126551 - DNA, 25 bp, Homo sapien
ttaacatccaacagagtacttaagg

SEQ ID NO: 126552 - DNA, 25 bp, Homo sapien
ttaacatccaactgagtacttaagg

SEQ ID NO: 126553 - DNA, 25 bp, Homo sapien
atataatcctaatggacagtcagtg

SEQ ID NO: 126554 - DNA, 25 bp, Homo sapien
atataatcctaaaggacagtcagtg

SEQ ID NO: 126555 - DNA, 25 bp, Homo sapien
acagacattgttccacgaccacacc

SEQ ID NO: 126556 - DNA, 25 bp, Homo sapien
acagacattgttgcacgaccacacc

SEQ ID NO: 126557 - DNA, 25 bp, Homo sapien
gagtttgtgtcgtgactgacacggt

SEQ ID NO: 126558 - DNA, 25 bp, Homo sapien
gagtttgtgtcgagactgacacggt

SEQ ID NO: 126559 - DNA, 25 bp, Homo sapien
aaagaaatagctcaccctgtgatgt

SEQ ID NO: 126560 - DNA, 25 bp, Homo sapien
aaagaaatagctgaccctgtgatgt

SEQ ID NO: 126561 - DNA, 25 bp, Homo sapien
gaaacgtaaaacaccaccgtaatgt

SEQ ID NO: 126562 - DNA, 25 bp, Homo sapien
gaaacgtaaaactccaccgtaatgt

SEQ ID NO: 126563 - DNA, 25 bp, Homo sapien
gcgggttaacatttatactcattat

SEQ ID NO: 126564 - DNA, 25 bp, Homo sapien
gcgggttaacatatatactcattat

SEQ ID NO: 126565 - DNA, 25 bp, Homo sapien
gtggtgtccctctagatacacggtt

SEQ ID NO: 126566 - DNA, 25 bp, Homo sapien
gtggtgtccctcaagatacacggtt

SEQ ID NO: 126567 - DNA, 25 bp, Homo sapien
cggcgacagcagacgtatacaagta

SEQ ID NO: 126568 - DNA, 25 bp, Homo sapien
cggcgacagcagtcgtatacaagta

SEQ ID NO: 126569 - DNA, 25 bp, Homo sapien
ggactcgcaccactacagtataaag

SEQ ID NO: 126570 - DNA, 25 bp, Homo sapien
ggactcgcaccagtacagtataaag

SEQ ID NO: 126571 - DNA, 25 bp, Homo sapien
tgttacgcagaatgtcggagtcaga

SEQ ID NO: 126572 - DNA, 25 bp, Homo sapien
tgttacgcagaaagtcggagtcaga

SEQ ID NO: 126573 - DNA, 25 bp, Homo sapien
tgtgtcgagagacgtctgatctgtg

SEQ ID NO: 126574 - DNA, 25 bp, Homo sapien
tgtgtcgagagaggtctgatctgtg

SEQ ID NO: 126575 - DNA, 25 bp, Homo sapien
aggtcttagggtacgtagacgtcga

SEQ ID NO: 126576 - DNA, 25 bp, Homo sapien
aggtcttagggttcgtagacgtcga

SEQ ID NO: 126577 - DNA, 25 bp, Homo sapien
tgagagtccttgtgagcgtcggtca

SEQ ID NO: 126578 - DNA, 25 bp, Homo sapien
tgagagtccttgagagcgtcggtca

SEQ ID NO: 126579 - DNA, 25 bp, Homo sapien
acggagtcactcattgagtccctga

SEQ ID NO: 126580 - DNA, 25 bp, Homo sapien
acggagtcactctttgagtccctga

SEQ ID NO: 126581 - DNA, 25 bp, Homo sapien
ttacgtgggctcgttgttcttctga

SEQ ID NO: 126582 - DNA, 25 bp, Homo sapien
ttacgtgggctccttgttcttctga

SEQ ID NO: 126583 - DNA, 25 bp, Homo sapien
ccgcggttaccgtaatgtctctttc

SEQ ID NO: 126584 - DNA, 25 bp, Homo sapien
ccgcggttaccgaaatgtctctttc

SEQ ID NO: 126585 - DNA, 25 bp, Homo sapien
gacaagaacgggaaatgtcaacgtc

SEQ ID NO: 126586 - DNA, 25 bp, Homo sapien
gacaagaacgggtaatgtcaacgtc

SEQ ID NO: 126587 - DNA, 25 bp, Homo sapien
cagacgagggaagtaaacgcattct

SEQ ID NO: 126588 - DNA, 25 bp, Homo sapien
cagacgagggaactaaacgcattct

SEQ ID NO: 126589 - DNA, 25 bp, Homo sapien
caccgacccgaactgaagaccggtt

SEQ ID NO: 126590 - DNA, 25 bp, Homo sapien
caccgacccgaagtgaagaccggtt

SEQ ID NO: 126591 - DNA, 25 bp, Homo sapien
gtcacccacatagaccgacggccgt

SEQ ID NO: 126592 - DNA, 25 bp, Homo sapien
gtcacccacatacaccgacggccgt

SEQ ID NO: 126593 - DNA, 25 bp, Homo sapien
ggttccaccagtcgatcgacggccg

SEQ ID NO: 126594 - DNA, 25 bp, Homo sapien
ggttccaccagtggatcgacggccg

SEQ ID NO: 126595 - DNA, 25 bp, Homo sapien
cggacaccaccgtgtgtcacagggg

SEQ ID NO: 126596 - DNA, 25 bp, Homo sapien
cggacaccaccgagtgtcacagggg

SEQ ID NO: 126597 - DNA, 25 bp, Homo sapien
aggtactggggcatccgtattcaca

SEQ ID NO: 126598 - DNA, 25 bp, Homo sapien
aggtactggggcttccgtattcaca

SEQ ID NO: 126599 - DNA, 25 bp, Homo sapien
ataggaagaatccttcctgtttaat

SEQ ID NO: 126600 - DNA, 25 bp, Homo sapien
ataggaagaatcgttcctgtttaat

SEQ ID NO: 126601 - DNA, 25 bp, Homo sapien
cgccatgtactatgtctttatctga

SEQ ID NO: 126602 - DNA, 25 bp, Homo sapien
cgccatgtactaagtctttatctga

SEQ ID NO: 126603 - DNA, 25 bp, Homo sapien
gatgactagaagaagttccagtcaa

SEQ ID NO: 126604 - DNA, 25 bp, Homo sapien
gatgactagaagtagttccagtcaa

SEQ ID NO: 126605 - DNA, 25 bp, Homo sapien
gggactagacacgagactcccccac

SEQ ID NO: 126606 - DNA, 25 bp, Homo sapien
gggactagacaccagactcccccac

SEQ ID NO: 126607 - DNA, 25 bp, Homo sapien
actgaaagacgactcgaccgtgacg

SEQ ID NO: 126608 - DNA, 25 bp, Homo sapien
actgaaagacgagtcgaccgtgacg

SEQ ID NO: 126609 - DNA, 25 bp, Homo sapien
taacggatacagttaacgtttgtca

SEQ ID NO: 126610 - DNA, 25 bp, Homo sapien
taacggatacagataacgtttgtca

SEQ ID NO: 126611 - DNA, 25 bp, Homo sapien
tgaccagattagtagtctctttaat

SEQ ID NO: 126612 - DNA, 25 bp, Homo sapien
tgaccagattagaagtctctttaat

SEQ ID NO: 126613 - DNA, 25 bp, Homo sapien
tgtgaacaatgacatgtcgcataat

SEQ ID NO: 126614 - DNA, 25 bp, Homo sapien
tgtgaacaatgagatgtcgcataat

SEQ ID NO: 126615 - DNA, 25 bp, Homo sapien
acgtttaacattcagtgttcctaaa

SEQ ID NO: 126616 - DNA, 25 bp, Homo sapien
acgtttaacattgagtgttcctaaa

SEQ ID NO: 126617 - DNA, 25 bp, Homo sapien
ttatcccgtcttagcttgtgagaca

SEQ ID NO: 126618 - DNA, 25 bp, Homo sapien
ttatcccgtctttgcttgtgagaca

SEQ ID NO: 126619 - DNA, 25 bp, Homo sapien
tgtcaccccacgcggttcgggacac

SEQ ID NO: 126620 - DNA, 25 bp, Homo sapien
tgtcaccccacggggttcgggacac

SEQ ID NO: 126621 - DNA, 25 bp, Homo sapien
ctgcccgaaccctgggaagtaactc

SEQ ID NO: 126622 - DNA, 25 bp, Homo sapien
ctgcccgaacccagggaagtaactc

SEQ ID NO: 126623 - DNA, 25 bp, Homo sapien
tcggcggaactacaggaagaaccac

SEQ ID NO: 126624 - DNA, 25 bp, Homo sapien
tcggcggaactagaggaagaaccac

SEQ ID NO: 126625 - DNA, 25 bp, Homo sapien
tgtcacggagtgtagggaagccttc

SEQ ID NO: 126626 - DNA, 25 bp, Homo sapien
tgtcacggagtgaagggaagccttc

SEQ ID NO: 126627 - DNA, 25 bp, Homo sapien
tctactgtcgggacccctggggtct

SEQ ID NO: 126628 - DNA, 25 bp, Homo sapien
tctactgtcgggtcccctggggtct

SEQ ID NO: 126629 - DNA, 25 bp, Homo sapien
cgctctgtgtttccaccgcagggtc

SEQ ID NO: 126630 - DNA, 25 bp, Homo sapien
cgctctgtgtttgcaccgcagggtc

SEQ ID NO: 126631 - DNA, 25 bp, Homo sapien
gggttgtcacctctagcccggagtc

SEQ ID NO: 126632 - DNA, 25 bp, Homo sapien
gggttgtcacctgtagcccggagtc

SEQ ID NO: 126633 - DNA, 25 bp, Homo sapien
gttgatataccatccctcgtaagag

SEQ ID NO: 126634 - DNA, 25 bp, Homo sapien
gttgatataccaaccctcgtaagag

SEQ ID NO: 126635 - DNA, 25 bp, Homo sapien
ggtgacgacacactaatctgtccgg

SEQ ID NO: 126636 - DNA, 25 bp, Homo sapien
ggtgacgacacagtaatctgtccgg

SEQ ID NO: 126637 - DNA, 25 bp, Homo sapien
aacaacgggaaagacaatgtaccct

SEQ ID NO: 126638 - DNA, 25 bp, Homo sapien
aacaacgggaaacacaatgtaccct

SEQ ID NO: 126639 - DNA, 25 bp, Homo sapien
cagaggttccggtagacaaaacgtt

SEQ ID NO: 126640 - DNA, 25 bp, Homo sapien
cagaggttccggaagacaaaacgtt

SEQ ID NO: 126641 - DNA, 25 bp, Homo sapien
gactgtttagacacgacacaaatat

SEQ ID NO: 126642 - DNA, 25 bp, Homo sapien
gactgtttagactcgacacaaatat

SEQ ID NO: 126643 - DNA, 25 bp, Homo sapien
cgaacctggagtgtccgagtgtaga

SEQ ID NO: 126644 - DNA, 25 bp, Homo sapien
cgaacctggagtctccgagtgtaga

SEQ ID NO: 126645 - DNA, 25 bp, Homo sapien
ccactgtggcggagtcggacgtcac

SEQ ID NO: 126646 - DNA, 25 bp, Homo sapien
ccactgtggcggtgtcggacgtcac

SEQ ID NO: 126647 - DNA, 25 bp, Homo sapien
ttgaactccgtcagtctgtcgtccg

SEQ ID NO: 126648 - DNA, 25 bp, Homo sapien
ttgaactccgtctgtctgtcgtccg

SEQ ID NO: 126649 - DNA, 25 bp, Homo sapien
gttggttacccgacgtcctatcaac

SEQ ID NO: 126650 - DNA, 25 bp, Homo sapien
gttggttacccgtcgtcctatcaac

SEQ ID NO: 126651 - DNA, 25 bp, Homo sapien
ggtgccctcacacttctctcgaagt

SEQ ID NO: 126652 - DNA, 25 bp, Homo sapien
ggtgccctcacagttctctcgaagt

SEQ ID NO: 126653 - DNA, 25 bp, Homo sapien
tagggtttcgtctcatccctgactc

SEQ ID NO: 126654 - DNA, 25 bp, Homo sapien
tagggtttcgtcacatccctgactc

SEQ ID NO: 126655 - DNA, 25 bp, Homo sapien
gttgattctgtctacattgcttacc

SEQ ID NO: 126656 - DNA, 25 bp, Homo sapien
gttgattctgtcaacattgcttacc

SEQ ID NO: 126657 - DNA, 25 bp, Homo sapien
taacggtctaggtctctttcgcgcc

SEQ ID NO: 126658 - DNA, 25 bp, Homo sapien
taacggtctaggactctttcgcgcc

SEQ ID NO: 126659 - DNA, 25 bp, Homo sapien
ccgatcaggttcaggaggctagtcc

SEQ ID NO: 126660 - DNA, 25 bp, Homo sapien
ccgatcaggttctggaggctagtcc

SEQ ID NO: 126661 - DNA, 25 bp, Homo sapien
accatcgacgtttcgggctgaaagg

SEQ ID NO: 126662 - DNA, 25 bp, Homo sapien
accatcgacgttacgggctgaaagg

SEQ ID NO: 126663 - DNA, 25 bp, Homo sapien
acacccggatctcgtcgtgaaagtg

SEQ ID NO: 126664 - DNA, 25 bp, Homo sapien
acacccggatctggtcgtgaaagtg

SEQ ID NO: 126665 - DNA, 25 bp, Homo sapien
cgactgtaggacgtctgcgaaaagg

SEQ ID NO: 126666 - DNA, 25 bp, Homo sapien
cgactgtaggacctctgcgaaaagg

SEQ ID NO: 126667 - DNA, 25 bp, Homo sapien
cgtcggcgtcctggtgcgaagacaa

SEQ ID NO: 126668 - DNA, 25 bp, Homo sapien
cgtcggcgtcctcgtgcgaagacaa

SEQ ID NO: 126669 - DNA, 25 bp, Homo sapien
agtacgcgctagtttcgttaaaagt

SEQ ID NO: 126670 - DNA, 25 bp, Homo sapien
agtacgcgctagattcgttaaaagt

SEQ ID NO: 126671 - DNA, 25 bp, Homo sapien
ggggaaaaatccatctacttcctat

SEQ ID NO: 126672 - DNA, 25 bp, Homo sapien
ggggaaaaatccttctacttcctat

SEQ ID NO: 126673 - DNA, 25 bp, Homo sapien
gggcgaaagaagtgttttctcccct

SEQ ID NO: 126674 - DNA, 25 bp, Homo sapien
gggcgaaagaagagttttctcccct

SEQ ID NO: 126675 - DNA, 25 bp, Homo sapien
gacaaaagacaacgatatttccact

SEQ ID NO: 126676 - DNA, 25 bp, Homo sapien
gacaaaagacaaggatatttccact

SEQ ID NO: 126677 - DNA, 25 bp, Homo sapien
agagacgaaccctaactgtctcggt

SEQ ID NO: 126678 - DNA, 25 bp, Homo sapien
agagacgaacccaaactgtctcggt

SEQ ID NO: 126679 - DNA, 25 bp, Homo sapien
cgaggaggagaacctatttgctagg

SEQ ID NO: 126680 - DNA, 25 bp, Homo sapien
cgaggaggagaagctatttgctagg

SEQ ID NO: 126681 - DNA, 25 bp, Homo sapien
gtcgcgcgggtacagcatcgccacg

SEQ ID NO: 126682 - DNA, 25 bp, Homo sapien
gtcgcgcgggtagagcatcgccacg

SEQ ID NO: 126683 - DNA, 25 bp, Homo sapien
tgtctgtggggacaggacgtcccac

SEQ ID NO: 126684 - DNA, 25 bp, Homo sapien
tgtctgtggggagaggacgtcccac

SEQ ID NO: 126685 - DNA, 25 bp, Homo sapien
atgtggtctgagtgtctgtgactca

SEQ ID NO: 126686 - DNA, 25 bp, Homo sapien
atgtggtctgagagtctgtgactca

SEQ ID NO: 126687 - DNA, 25 bp, Homo sapien
tgttggtttgacatgttagactacc

SEQ ID NO: 126688 - DNA, 25 bp, Homo sapien
tgttggtttgacttgttagactacc

SEQ ID NO: 126689 - DNA, 25 bp, Homo sapien
gtgccctaccggtccgagaacgtca

SEQ ID NO: 126690 - DNA, 25 bp, Homo sapien
gtgccctaccggaccgagaacgtca

SEQ ID NO: 126691 - DNA, 25 bp, Homo sapien
gttcccacgggtcctccgtaactgg

SEQ ID NO: 126692 - DNA, 25 bp, Homo sapien
gttcccacgggtgctccgtaactgg

SEQ ID NO: 126693 - DNA, 25 bp, Homo sapien
gacccggaccttgctccgaactggt

SEQ ID NO: 126694 - DNA, 25 bp, Homo sapien
gacccggaccttcctccgaactggt

SEQ ID NO: 126695 - DNA, 25 bp, Homo sapien
accggacctcggacgaggaactgtg

SEQ ID NO: 126696 - DNA, 25 bp, Homo sapien
accggacctcggtcgaggaactgtg

SEQ ID NO: 126697 - DNA, 25 bp, Homo sapien
aactcgttaactacccaaagagaga

SEQ ID NO: 126698 - DNA, 25 bp, Homo sapien
aactcgttaacttcccaaagagaga

SEQ ID NO: 126699 - DNA, 25 bp, Homo sapien
gtattactgtcacaaacgtgacgtt

SEQ ID NO: 126700 - DNA, 25 bp, Homo sapien
gtattactgtcagaaacgtgacgtt

SEQ ID NO: 126701 - DNA, 25 bp, Homo sapien
cttttatggtcgaacgaaacttcag

SEQ ID NO: 126702 - DNA, 25 bp, Homo sapien
cttttatggtcgtacgaaacttcag

SEQ ID NO: 126703 - DNA, 25 bp, Homo sapien
cttcttttaggtatacgaacccagt

SEQ ID NO: 126704 - DNA, 25 bp, Homo sapien
cttcttttaggtttacgaacccagt

SEQ ID NO: 126705 - DNA, 25 bp, Homo sapien
cgtttcaatgtggtttgaccccact

SEQ ID NO: 126706 - DNA, 25 bp, Homo sapien
cgtttcaatgtgctttgaccccact

SEQ ID NO: 126707 - DNA, 25 bp, Homo sapien
ggatcaagttgtctatcttaacttc

SEQ ID NO: 126708 - DNA, 25 bp, Homo sapien
ggatcaagttgtgtatcttaacttc

SEQ ID NO: 126709 - DNA, 25 bp, Homo sapien
attagaacatacctcttatatgtgg

SEQ ID NO: 126710 - DNA, 25 bp, Homo sapien
attagaacatacgtcttatatgtgg

SEQ ID NO: 126711 - DNA, 25 bp, Homo sapien
ctttcttttactattgagttctgac

SEQ ID NO: 126712 - DNA, 25 bp, Homo sapien
ctttcttttacttttgagttctgac

SEQ ID NO: 126713 - DNA, 25 bp, Homo sapien
ttcttcctcttctcgggtgcgtgta

SEQ ID NO: 126714 - DNA, 25 bp, Homo sapien
ttcttcctcttcacgggtgcgtgta

SEQ ID NO: 126715 - DNA, 25 bp, Homo sapien
tttttaactcctctgaagacagacg

SEQ ID NO: 126716 - DNA, 25 bp, Homo sapien
tttttaactcctgtgaagacagacg

SEQ ID NO: 126717 - DNA, 25 bp, Homo sapien
tctagagacctgtgtacttactaga

SEQ ID NO: 126718 - DNA, 25 bp, Homo sapien
tctagagacctgagtacttactaga

SEQ ID NO: 126719 - DNA, 25 bp, Homo sapien
ttcggagatcgtatcgactttagag

SEQ ID NO: 126720 - DNA, 25 bp, Homo sapien
ttcggagatcgtttcgactttagag

SEQ ID NO: 126721 - DNA, 25 bp, Homo sapien
gtaggagtcactttcactcggtaag

SEQ ID NO: 126722 - DNA, 25 bp, Homo sapien
gtaggagtcactatcactcggtaag

SEQ ID NO: 126723 - DNA, 25 bp, Homo sapien
aaggagtccggagcataggtactcg

SEQ ID NO: 126724 - DNA, 25 bp, Homo sapien
aaggagtccggaccataggtactcg

SEQ ID NO: 126725 - DNA, 25 bp, Homo sapien
ctcttgtgtcgtctgaagggagacc

SEQ ID NO: 126726 - DNA, 25 bp, Homo sapien
ctcttgtgtcgtgtgaagggagacc

SEQ ID NO: 126727 - DNA, 25 bp, Homo sapien
tttaaccggctcaactacgggcgac

SEQ ID NO: 126728 - DNA, 25 bp, Homo sapien
tttaaccggctctactacgggcgac

SEQ ID NO: 126729 - DNA, 25 bp, Homo sapien
gtgtccatggattcccgaagtcgac

SEQ ID NO: 126730 - DNA, 25 bp, Homo sapien
gtgtccatggatacccgaagtcgac

SEQ ID NO: 126731 - DNA, 25 bp, Homo sapien
cgactccagtgacgatttgacgtca

SEQ ID NO: 126732 - DNA, 25 bp, Homo sapien
cgactccagtgaggatttgacgtca

SEQ ID NO: 126733 - DNA, 25 bp, Homo sapien
gctccggcggcgtctaggtctaggt

SEQ ID NO: 126734 - DNA, 25 bp, Homo sapien
gctccggcggcgactaggtctaggt

SEQ ID NO: 126735 - DNA, 25 bp, Homo sapien
aaatccttgtaagttgtagtcttcg

SEQ ID NO: 126736 - DNA, 25 bp, Homo sapien
aaatccttgtaacttgtagtcttcg

SEQ ID NO: 126737 - DNA, 25 bp, Homo sapien
gatcctttagagtctagactgttct

SEQ ID NO: 126738 - DNA, 25 bp, Homo sapien
gatcctttagagactagactgttct

SEQ ID NO: 126739 - DNA, 25 bp, Homo sapien
ccatcggtttctttagatagtgtta

SEQ ID NO: 126740 - DNA, 25 bp, Homo sapien
ccatcggtttctatagatagtgtta

SEQ ID NO: 126741 - DNA, 25 bp, Homo sapien
cacacgggtccgtcacgaactttac

SEQ ID NO: 126742 - DNA, 25 bp, Homo sapien
cacacgggtccgacacgaactttac

SEQ ID NO: 126743 - DNA, 25 bp, Homo sapien
acggtaaaggtaacacttcttgtag

SEQ ID NO: 126744 - DNA, 25 bp, Homo sapien
acggtaaaggtatcacttcttgtag

SEQ ID NO: 126745 - DNA, 25 bp, Homo sapien
gggtccaaagtgtcctctctgtctg

SEQ ID NO: 126746 - DNA, 25 bp, Homo sapien
gggtccaaagtgacctctctgtctg

SEQ ID NO: 126747 - DNA, 25 bp, Homo sapien
ggagtcctaaatctttcacctcgta

SEQ ID NO: 126748 - DNA, 25 bp, Homo sapien
ggagtcctaaatgtttcacctcgta

SEQ ID NO: 126749 - DNA, 25 bp, Homo sapien
gtgtcgaaaagtatctttctaccat

SEQ ID NO: 126750 - DNA, 25 bp, Homo sapien
gtgtcgaaaagtttctttctaccat

SEQ ID NO: 126751 - DNA, 25 bp, Homo sapien
tggtactgacttctttgtcataagt

SEQ ID NO: 126752 - DNA, 25 bp, Homo sapien
tggtactgacttgtttgtcataagt

SEQ ID NO: 126753 - DNA, 25 bp, Homo sapien
tttggtcgtttttattttcgtttct

SEQ ID NO: 126754 - DNA, 25 bp, Homo sapien
tttggtcgttttaattttcgtttct

SEQ ID NO: 126755 - DNA, 25 bp, Homo sapien
ttgtcggtgttgtgttaccccattt

SEQ ID NO: 126756 - DNA, 25 bp, Homo sapien
ttgtcggtgttgagttaccccattt

SEQ ID NO: 126757 - DNA, 25 bp, Homo sapien
accctacagaggttctttgtaatag

SEQ ID NO: 126758 - DNA, 25 bp, Homo sapien
accctacagaggatctttgtaatag

SEQ ID NO: 126759 - DNA, 25 bp, Homo sapien
aaaggaaatctccagtataagaatc

SEQ ID NO: 126760 - DNA, 25 bp, Homo sapien
aaaggaaatctcgagtataagaatc

SEQ ID NO: 126761 - DNA, 25 bp, Homo sapien
aagatacacctcagcgaaaaacgag

SEQ ID NO: 126762 - DNA, 25 bp, Homo sapien
aagatacacctctgcgaaaaacgag

SEQ ID NO: 126763 - DNA, 25 bp, Homo sapien
ttaaagtccgtgtcttactggaaga

SEQ ID NO: 126764 - DNA, 25 bp, Homo sapien
ttaaagtccgtgacttactggaaga

SEQ ID NO: 126765 - DNA, 25 bp, Homo sapien
gtcagcgtcgggacgtcttccaaag

SEQ ID NO: 126766 - DNA, 25 bp, Homo sapien
gtcagcgtcgggtcgtcttccaaag

SEQ ID NO: 126767 - DNA, 25 bp, Homo sapien
gagtcaaggggtctactttgtaaca

SEQ ID NO: 126768 - DNA, 25 bp, Homo sapien
gagtcaaggggtgtactttgtaaca

SEQ ID NO: 126769 - DNA, 25 bp, Homo sapien
gtgtggacgcggagaagactttcca

SEQ ID NO: 126770 - DNA, 25 bp, Homo sapien
gtgtggacgcggtgaagactttcca

SEQ ID NO: 126771 - DNA, 25 bp, Homo sapien
ggacgacacacaggaactcacccag

SEQ ID NO: 126772 - DNA, 25 bp, Homo sapien
ggacgacacacacgaactcacccag

SEQ ID NO: 126773 - DNA, 25 bp, Homo sapien
gtgacggccggtgaaccccgtctgt

SEQ ID NO: 126774 - DNA, 25 bp, Homo sapien
gtgacggccggtcaaccccgtctgt

SEQ ID NO: 126775 - DNA, 25 bp, Homo sapien
aaaggagggcttcatcctaccttcg

SEQ ID NO: 126776 - DNA, 25 bp, Homo sapien
aaaggagggcttgatcctaccttcg

SEQ ID NO: 126777 - DNA, 25 bp, Homo sapien
aaccacggtgggtagaaccactttc

SEQ ID NO: 126778 - DNA, 25 bp, Homo sapien
aaccacggtgggaagaaccactttc

SEQ ID NO: 126779 - DNA, 25 bp, Homo sapien
tacccggggtcgaccgtccctagta

SEQ ID NO: 126780 - DNA, 25 bp, Homo sapien
tacccggggtcgtccgtccctagta

SEQ ID NO: 126781 - DNA, 25 bp, Homo sapien
gactctgaagggtcggttactggac

SEQ ID NO: 126782 - DNA, 25 bp, Homo sapien
gactctgaagggacggttactggac

SEQ ID NO: 126783 - DNA, 25 bp, Homo sapien
gcctaaacgttcacggacatcggag

SEQ ID NO: 126784 - DNA, 25 bp, Homo sapien
gcctaaacgttctcggacatcggag

SEQ ID NO: 126785 - DNA, 25 bp, Homo sapien
aatgtcgcttgctcccggaatgtaa

SEQ ID NO: 126786 - DNA, 25 bp, Homo sapien
aatgtcgcttgcacccggaatgtaa

SEQ ID NO: 126787 - DNA, 25 bp, Homo sapien
actatacacctttccgaaggacacg

SEQ ID NO: 126788 - DNA, 25 bp, Homo sapien
actatacaccttaccgaaggacacg

SEQ ID NO: 126789 - DNA, 25 bp, Homo sapien
tactgaaccagacgacatagacaca

SEQ ID NO: 126790 - DNA, 25 bp, Homo sapien
tactgaaccagaggacatagacaca

SEQ ID NO: 126791 - DNA, 25 bp, Homo sapien
agcgtcccgtccaacttcaagaaca

SEQ ID NO: 126792 - DNA, 25 bp, Homo sapien
agcgtcccgtcctacttcaagaaca

SEQ ID NO: 126793 - DNA, 25 bp, Homo sapien
aagagcgccgcgagtgccattcgca

SEQ ID NO: 126794 - DNA, 25 bp, Homo sapien
aagagcgccgcgtgtgccattcgca

SEQ ID NO: 126795 - DNA, 25 bp, Homo sapien
aggtcatgaactggtataactccct

SEQ ID NO: 126796 - DNA, 25 bp, Homo sapien
aggtcatgaactcgtataactccct

SEQ ID NO: 126797 - DNA, 25 bp, Homo sapien
tgtaagacatgcatccagacctccc

SEQ ID NO: 126798 - DNA, 25 bp, Homo sapien
tgtaagacatgcttccagacctccc

SEQ ID NO: 126799 - DNA, 25 bp, Homo sapien
agaaacgactttccgaaacctaata

SEQ ID NO: 126800 - DNA, 25 bp, Homo sapien
agaaacgactttgcgaaacctaata

SEQ ID NO: 126801 - DNA, 25 bp, Homo sapien
aggacactatgttgggccgacaaca

SEQ ID NO: 126802 - DNA, 25 bp, Homo sapien
aggacactatgtagggccgacaaca

SEQ ID NO: 126803 - DNA, 25 bp, Homo sapien
gagacctataaaagttccaccgaca

SEQ ID NO: 126804 - DNA, 25 bp, Homo sapien
gagacctataaatgttccaccgaca

SEQ ID NO: 126805 - DNA, 25 bp, Homo sapien
aactttaaccggtacctacgagacc

SEQ ID NO: 126806 - DNA, 25 bp, Homo sapien
aactttaaccggaacctacgagacc

SEQ ID NO: 126807 - DNA, 25 bp, Homo sapien
gataattgttggaaaatccgaacct

SEQ ID NO: 126808 - DNA, 25 bp, Homo sapien
gataattgttggtaaatccgaacct

SEQ ID NO: 126809 - DNA, 25 bp, Homo sapien
tctggtgtgacgacatccgactctt

SEQ ID NO: 126810 - DNA, 25 bp, Homo sapien
tctggtgtgacgtcatccgactctt

SEQ ID NO: 126811 - DNA, 25 bp, Homo sapien
tccggagtgagagtcaccgacactt

SEQ ID NO: 126812 - DNA, 25 bp, Homo sapien
tccggagtgagactcaccgacactt

SEQ ID NO: 126813 - DNA, 25 bp, Homo sapien
ctgtctcttgcgaggcttccgacca

SEQ ID NO: 126814 - DNA, 25 bp, Homo sapien
ctgtctcttgcgtggcttccgacca

SEQ ID NO: 126815 - DNA, 25 bp, Homo sapien
cagtcgtgtcttggaccccggtcta

SEQ ID NO: 126816 - DNA, 25 bp, Homo sapien
cagtcgtgtcttcgaccccggtcta

SEQ ID NO: 126817 - DNA, 25 bp, Homo sapien
tccggtcgtaacagaccgtccttca

SEQ ID NO: 126818 - DNA, 25 bp, Homo sapien
tccggtcgtaactgaccgtccttca

SEQ ID NO: 126819 - DNA, 25 bp, Homo sapien
gtgcaccgcactaggtggtgcccga

SEQ ID NO: 126820 - DNA, 25 bp, Homo sapien
gtgcaccgcacttggtggtgcccga

SEQ ID NO: 126821 - DNA, 25 bp, Homo sapien
acaccgacacttagtggacccttac

SEQ ID NO: 126822 - DNA, 25 bp, Homo sapien
acaccgacactttgtggacccttac

SEQ ID NO: 126823 - DNA, 25 bp, Homo sapien
cctttaaagtgtaggtgatgtcttc

SEQ ID NO: 126824 - DNA, 25 bp, Homo sapien
cctttaaagtgttggtgatgtcttc

SEQ ID NO: 126825 - DNA, 25 bp, Homo sapien
cggaatgagtatggtcgaaggactc

SEQ ID NO: 126826 - DNA, 25 bp, Homo sapien
cggaatgagtatcgtcgaaggactc

SEQ ID NO: 126827 - DNA, 25 bp, Homo sapien
gaggtgtcaggactacgacagaaag

SEQ ID NO: 126828 - DNA, 25 bp, Homo sapien
gaggtgtcaggagtacgacagaaag

SEQ ID NO: 126829 - DNA, 25 bp, Homo sapien
cacgtgtgttcgacccgaaaaagag

SEQ ID NO: 126830 - DNA, 25 bp, Homo sapien
cacgtgtgttcgtcccgaaaaagag

SEQ ID NO: 126831 - DNA, 25 bp, Homo sapien
ggggtcctgcccgacgaagacgtgc

SEQ ID NO: 126832 - DNA, 25 bp, Homo sapien
ggggtcctgccccacgaagacgtgc

SEQ ID NO: 126833 - DNA, 25 bp, Homo sapien
gaatatacctgactcccaaaggtct

SEQ ID NO: 126834 - DNA, 25 bp, Homo sapien
gaatatacctgagtcccaaaggtct

SEQ ID NO: 126835 - DNA, 25 bp, Homo sapien
gattctctcgagtaccacaaatgtt

SEQ ID NO: 126836 - DNA, 25 bp, Homo sapien
gattctctcgagaaccacaaatgtt

SEQ ID NO: 126837 - DNA, 25 bp, Homo sapien
ctgttctgtcgacaaatgactctgt

SEQ ID NO: 126838 - DNA, 25 bp, Homo sapien
ctgttctgtcgagaaatgactctgt

SEQ ID NO: 126839 - DNA, 25 bp, Homo sapien
atcctgtgtttactaaaagtccagt

SEQ ID NO: 126840 - DNA, 25 bp, Homo sapien
atcctgtgtttagtaaaagtccagt

SEQ ID NO: 126841 - DNA, 25 bp, Homo sapien
tcctgtgcctcgtgaagacggacac

SEQ ID NO: 126842 - DNA, 25 bp, Homo sapien
tcctgtgcctcgagaagacggacac

SEQ ID NO: 126843 - DNA, 25 bp, Homo sapien
ttctcatggaccaaacgaagatcga

SEQ ID NO: 126844 - DNA, 25 bp, Homo sapien
ttctcatggacctaacgaagatcga

SEQ ID NO: 126845 - DNA, 25 bp, Homo sapien
gtcccaacggccttcgaagagaaga

SEQ ID NO: 126846 - DNA, 25 bp, Homo sapien
gtcccaacggccatcgaagagaaga

SEQ ID NO: 126847 - DNA, 25 bp, Homo sapien
acgccgacgcgaacgcgaagaacgg

SEQ ID NO: 126848 - DNA, 25 bp, Homo sapien
acgccgacgcgatcgcgaagaacgg

SEQ ID NO: 126849 - DNA, 25 bp, Homo sapien
caagaggagtagtgtcactgtcgag

SEQ ID NO: 126850 - DNA, 25 bp, Homo sapien
caagaggagtagagtcactgtcgag

SEQ ID NO: 126851 - DNA, 25 bp, Homo sapien
agaaacattttgtacacgatactcg

SEQ ID NO: 126852 - DNA, 25 bp, Homo sapien
agaaacattttgaacacgatactcg

SEQ ID NO: 126853 - DNA, 25 bp, Homo sapien
cagattcatccactgatcacgaatg

SEQ ID NO: 126854 - DNA, 25 bp, Homo sapien
cagattcatccagtgatcacgaatg

SEQ ID NO: 126855 - DNA, 25 bp, Homo sapien
caagaggtcgctcaggcccgacagg

SEQ ID NO: 126856 - DNA, 25 bp, Homo sapien
caagaggtcgctgaggcccgacagg

SEQ ID NO: 126857 - DNA, 25 bp, Homo sapien
ccctcgggcctaaggccggagtgtt

SEQ ID NO: 126858 - DNA, 25 bp, Homo sapien
ccctcgggcctatggccggagtgtt

SEQ ID NO: 126859 - DNA, 25 bp, Homo sapien
tgtctggcacctggaccgaaggagt

SEQ ID NO: 126860 - DNA, 25 bp, Homo sapien
tgtctggcacctcgaccgaaggagt

SEQ ID NO: 126861 - DNA, 25 bp, Homo sapien
tctgtgcaccgatccgtcatcgggt

SEQ ID NO: 126862 - DNA, 25 bp, Homo sapien
tctgtgcaccgaaccgtcatcgggt

SEQ ID NO: 126863 - DNA, 25 bp, Homo sapien
tccgccgacctgtaggaagcgtagt

SEQ ID NO: 126864 - DNA, 25 bp, Homo sapien
tccgccgacctgaaggaagcgtagt

SEQ ID NO: 126865 - DNA, 25 bp, Homo sapien
tgtcggtcggtctccagaggaagtt

SEQ ID NO: 126866 - DNA, 25 bp, Homo sapien
tgtcggtcggtcaccagaggaagtt

SEQ ID NO: 126867 - DNA, 25 bp, Homo sapien
tctagtaaaccacatgaacgagtct

SEQ ID NO: 126868 - DNA, 25 bp, Homo sapien
tctagtaaaccagatgaacgagtct

SEQ ID NO: 126869 - DNA, 25 bp, Homo sapien
atcggaaactccagtctcccgttct

SEQ ID NO: 126870 - DNA, 25 bp, Homo sapien
atcggaaactcctgtctcccgttct

SEQ ID NO: 126871 - DNA, 25 bp, Homo sapien
ctgtcacacctttacgtagtttcag

SEQ ID NO: 126872 - DNA, 25 bp, Homo sapien
ctgtcacaccttaacgtagtttcag

SEQ ID NO: 126873 - DNA, 25 bp, Homo sapien
atagttcccagtttatagcgtgtaa

SEQ ID NO: 126874 - DNA, 25 bp, Homo sapien
atagttcccagtatatagcgtgtaa

SEQ ID NO: 126875 - DNA, 25 bp, Homo sapien
ttccgtccctatgactgtgacttca

SEQ ID NO: 126876 - DNA, 25 bp, Homo sapien
ttccgtccctatcactgtgacttca

SEQ ID NO: 126877 - DNA, 25 bp, Homo sapien
cctcgtcgtcgagaagaacgtcctc

SEQ ID NO: 126878 - DNA, 25 bp, Homo sapien
cctcgtcgtcgacaagaacgtcctc

SEQ ID NO: 126879 - DNA, 25 bp, Homo sapien
gacttttctcgacgtcacaggttcc

SEQ ID NO: 126880 - DNA, 25 bp, Homo sapien
gacttttctcgaggtcacaggttcc

SEQ ID NO: 126881 - DNA, 25 bp, Homo sapien
ttatatagcggtgagacgtaggccg

SEQ ID NO: 126882 - DNA, 25 bp, Homo sapien
ttatatagcggtcagacgtaggccg

SEQ ID NO: 126883 - DNA, 25 bp, Homo sapien
ggattttacaatgacgatgtcgtcc

SEQ ID NO: 126884 - DNA, 25 bp, Homo sapien
ggattttacaatcacgatgtcgtcc

SEQ ID NO: 126885 - DNA, 25 bp, Homo sapien
agtgtcgttttagtccgcgggtctt

SEQ ID NO: 126886 - DNA, 25 bp, Homo sapien
agtgtcgttttactccgcgggtctt

SEQ ID NO: 126887 - DNA, 25 bp, Homo sapien
tagagaatttatgttcggacagctc

SEQ ID NO: 126888 - DNA, 25 bp, Homo sapien
tagagaatttatcttcggacagctc

SEQ ID NO: 126889 - DNA, 25 bp, Homo sapien
taaattactttgtttcgtggcttac

SEQ ID NO: 126890 - DNA, 25 bp, Homo sapien
taaattactttgattcgtggcttac

SEQ ID NO: 126891 - DNA, 25 bp, Homo sapien
aatttacgtgttcatggggacttac

SEQ ID NO: 126892 - DNA, 25 bp, Homo sapien
aatttacgtgttgatggggacttac

SEQ ID NO: 126893 - DNA, 25 bp, Homo sapien
tatgtgtgttacaggacgactacgg

SEQ ID NO: 126894 - DNA, 25 bp, Homo sapien
tatgtgtgttactggacgactacgg

SEQ ID NO: 126895 - DNA, 25 bp, Homo sapien
ctacttgacctagacgagctagtag

SEQ ID NO: 126896 - DNA, 25 bp, Homo sapien
ctacttgacctacacgagctagtag

SEQ ID NO: 126897 - DNA, 25 bp, Homo sapien
cgtacctgagcgactacttactatt

SEQ ID NO: 126898 - DNA, 25 bp, Homo sapien
cgtacctgagcgtctacttactatt

SEQ ID NO: 126899 - DNA, 25 bp, Homo sapien
gcgaactcgcgcatctggtgtaggt

SEQ ID NO: 126900 - DNA, 25 bp, Homo sapien
gcgaactcgcgcttctggtgtaggt

SEQ ID NO: 126901 - DNA, 25 bp, Homo sapien
cgtgaagaccccttcgtcgcagagc

SEQ ID NO: 126902 - DNA, 25 bp, Homo sapien
cgtgaagaccccatcgtcgcagagc

SEQ ID NO: 126903 - DNA, 25 bp, Homo sapien
gtcttgggactcgtaatcttcggga

SEQ ID NO: 126904 - DNA, 25 bp, Homo sapien
gtcttgggactcctaatcttcggga

SEQ ID NO: 126905 - DNA, 25 bp, Homo sapien
tagtttgggatagtcttcttctcaa

SEQ ID NO: 126906 - DNA, 25 bp, Homo sapien
tagtttgggatactcttcttctcaa

SEQ ID NO: 126907 - DNA, 25 bp, Homo sapien
gagtcacaaggaaacttttattcaa

SEQ ID NO: 126908 - DNA, 25 bp, Homo sapien
gagtcacaaggatacttttattcaa

SEQ ID NO: 126909 - DNA, 25 bp, Homo sapien
gaacagagacgaaataattccccaa

SEQ ID NO: 126910 - DNA, 25 bp, Homo sapien
gaacagagacgatataattccccaa

SEQ ID NO: 126911 - DNA, 25 bp, Homo sapien
ggaaatgtataaaatgcctaccttg

SEQ ID NO: 126912 - DNA, 25 bp, Homo sapien
ggaaatgtataatatgcctaccttg

SEQ ID NO: 126913 - DNA, 25 bp, Homo sapien
taagaagtctctatccacaatctgg

SEQ ID NO: 126914 - DNA, 25 bp, Homo sapien
taagaagtctctttccacaatctgg

SEQ ID NO: 126915 - DNA, 25 bp, Homo sapien
cgagcctccttacagagacactagg

SEQ ID NO: 126916 - DNA, 25 bp, Homo sapien
cgagcctccttagagagacactagg

SEQ ID NO: 126917 - DNA, 25 bp, Homo sapien
cgggtcgtccctacaggagagatct

SEQ ID NO: 126918 - DNA, 25 bp, Homo sapien
cgggtcgtcccttcaggagagatct

SEQ ID NO: 126919 - DNA, 25 bp, Homo sapien
gcctttacctcgaggaacgtgatac

SEQ ID NO: 126920 - DNA, 25 bp, Homo sapien
gcctttacctcgtggaacgtgatac

SEQ ID NO: 126921 - DNA, 25 bp, Homo sapien
cacactttttcgtcgaagactggat

SEQ ID NO: 126922 - DNA, 25 bp, Homo sapien
cacactttttcgacgaagactggat

SEQ ID NO: 126923 - DNA, 25 bp, Homo sapien
acaattgtctttacgtcgacccggg

SEQ ID NO: 126924 - DNA, 25 bp, Homo sapien
acaattgtcttttcgtcgacccggg

SEQ ID NO: 126925 - DNA, 25 bp, Homo sapien
ccattactcttttgaaaccgagtcg

SEQ ID NO: 126926 - DNA, 25 bp, Homo sapien
ccattactctttagaaaccgagtcg

SEQ ID NO: 126927 - DNA, 25 bp, Homo sapien
ctcttcagtcccaagaacttcagtg

SEQ ID NO: 126928 - DNA, 25 bp, Homo sapien
ctcttcagtccctagaacttcagtg

SEQ ID NO: 126929 - DNA, 25 bp, Homo sapien
tactgtttcacaaacgtgtcctacg

SEQ ID NO: 126930 - DNA, 25 bp, Homo sapien
tactgtttcacatacgtgtcctacg

SEQ ID NO: 126931 - DNA, 25 bp, Homo sapien
aatactcgtggcagtaatctgtcaa

SEQ ID NO: 126932 - DNA, 25 bp, Homo sapien
aatactcgtggctgtaatctgtcaa

SEQ ID NO: 126933 - DNA, 25 bp, Homo sapien
tcacttagagggttcttgtcgagtt

SEQ ID NO: 126934 - DNA, 25 bp, Homo sapien
tcacttagagggatcttgtcgagtt

SEQ ID NO: 126935 - DNA, 25 bp, Homo sapien
cttccggaagggtgttaccgtgtct

SEQ ID NO: 126936 - DNA, 25 bp, Homo sapien
cttccggaagggagttaccgtgtct

SEQ ID NO: 126937 - DNA, 25 bp, Homo sapien
acccgtaacacgagggtcaccaggt

SEQ ID NO: 126938 - DNA, 25 bp, Homo sapien
acccgtaacacgtgggtcaccaggt

SEQ ID NO: 126939 - DNA, 25 bp, Homo sapien
cagtatgagttctgagtctaagtcc

SEQ ID NO: 126940 - DNA, 25 bp, Homo sapien
cagtatgagttcagagtctaagtcc

SEQ ID NO: 126941 - DNA, 25 bp, Homo sapien
actctagtgtgtccgacgccgggct

SEQ ID NO: 126942 - DNA, 25 bp, Homo sapien
actctagtgtgtgcgacgccgggct

SEQ ID NO: 126943 - DNA, 25 bp, Homo sapien
acaccgtccgtggtccgtcatggtc

SEQ ID NO: 126944 - DNA, 25 bp, Homo sapien
acaccgtccgtgctccgtcatggtc

SEQ ID NO: 126945 - DNA, 25 bp, Homo sapien
aaaacccctgacgagtcgtccggtc

SEQ ID NO: 126946 - DNA, 25 bp, Homo sapien
aaaacccctgaccagtcgtccggtc

SEQ ID NO: 126947 - DNA, 25 bp, Homo sapien
taggaaaccagtgacagtctccttc

SEQ ID NO: 126948 - DNA, 25 bp, Homo sapien
taggaaaccagtcacagtctccttc

SEQ ID NO: 126949 - DNA, 25 bp, Homo sapien
acgtaaaccggtaatgttacgatta

SEQ ID NO: 126950 - DNA, 25 bp, Homo sapien
acgtaaaccggttatgttacgatta

SEQ ID NO: 126951 - DNA, 25 bp, Homo sapien
cctcgatccttgatgtttacagtaa

SEQ ID NO: 126952 - DNA, 25 bp, Homo sapien
cctcgatccttgttgtttacagtaa

SEQ ID NO: 126953 - DNA, 25 bp, Homo sapien
ttgcaacgactttttcaacgttcga

SEQ ID NO: 126954 - DNA, 25 bp, Homo sapien
ttgcaacgacttattcaacgttcga

SEQ ID NO: 126955 - DNA, 25 bp, Homo sapien
tcagaagactctgagatcccctgag

SEQ ID NO: 126956 - DNA, 25 bp, Homo sapien
tcagaagactctcagatcccctgag

SEQ ID NO: 126957 - DNA, 25 bp, Homo sapien
aacgaggactggacccgtgtttacg

SEQ ID NO: 126958 - DNA, 25 bp, Homo sapien
aacgaggactggtcccgtgtttacg

SEQ ID NO: 126959 - DNA, 25 bp, Homo sapien
taagactcgtgtttcgtcgagtcaa

SEQ ID NO: 126960 - DNA, 25 bp, Homo sapien
taagactcgtgtatcgtcgagtcaa

SEQ ID NO: 126961 - DNA, 25 bp, Homo sapien
tatagagtcgtgagtacgaccccac

SEQ ID NO: 126962 - DNA, 25 bp, Homo sapien
tatagagtcgtgtgtacgaccccac

SEQ ID NO: 126963 - DNA, 25 bp, Homo sapien
taaataactctcgtgtcaccccacg

SEQ ID NO: 126964 - DNA, 25 bp, Homo sapien
taaataactctcctgtcaccccacg

SEQ ID NO: 126965 - DNA, 25 bp, Homo sapien
ataaggtattttgagacatctccag

SEQ ID NO: 126966 - DNA, 25 bp, Homo sapien
ataaggtattttcagacatctccag

SEQ ID NO: 126967 - DNA, 25 bp, Homo sapien
tccgaattatatgtccgcattccag

SEQ ID NO: 126968 - DNA, 25 bp, Homo sapien
tccgaattatatctccgcattccag

SEQ ID NO: 126969 - DNA, 25 bp, Homo sapien
ccaaagtccgaccactatctcgagg

SEQ ID NO: 126970 - DNA, 25 bp, Homo sapien
ccaaagtccgacgactatctcgagg

SEQ ID NO: 126971 - DNA, 25 bp, Homo sapien
aaccacgtaacctcgaccaaggatg

SEQ ID NO: 126972 - DNA, 25 bp, Homo sapien
aaccacgtaaccacgaccaaggatg

SEQ ID NO: 126973 - DNA, 25 bp, Homo sapien
agcagaagactcgacaccaataaga

SEQ ID NO: 126974 - DNA, 25 bp, Homo sapien
agcagaagactccacaccaataaga

SEQ ID NO: 126975 - DNA, 25 bp, Homo sapien
gacggaataagcgtagaccccataa

SEQ ID NO: 126976 - DNA, 25 bp, Homo sapien
gacggaataagcctagaccccataa

SEQ ID NO: 126977 - DNA, 25 bp, Homo sapien
cggttatactgtaggtcccgtttga

SEQ ID NO: 126978 - DNA, 25 bp, Homo sapien
cggttatactgttggtcccgtttga

SEQ ID NO: 126979 - DNA, 25 bp, Homo sapien
ctcctgtctgtgagtcccttagaga

SEQ ID NO: 126980 - DNA, 25 bp, Homo sapien
ctcctgtctgtgtgtcccttagaga

SEQ ID NO: 126981 - DNA, 25 bp, Homo sapien
cgtttgtctaggaaacattacaaga

SEQ ID NO: 126982 - DNA, 25 bp, Homo sapien
cgtttgtctaggtaacattacaaga

SEQ ID NO: 126983 - DNA, 25 bp, Homo sapien
ttttctaaggacgatctaacacacg

SEQ ID NO: 126984 - DNA, 25 bp, Homo sapien
ttttctaaggaccatctaacacacg

SEQ ID NO: 126985 - DNA, 25 bp, Homo sapien
tggtttcctaagaatttctttgtac

SEQ ID NO: 126986 - DNA, 25 bp, Homo sapien
tggtttcctaagtatttctttgtac

SEQ ID NO: 126987 - DNA, 25 bp, Homo sapien
gtatcaatctagtcccttaagaagt

SEQ ID NO: 126988 - DNA, 25 bp, Homo sapien
gtatcaatctagacccttaagaagt

SEQ ID NO: 126989 - DNA, 25 bp, Homo sapien
tttcaagttatgtcctcgtgagagg

SEQ ID NO: 126990 - DNA, 25 bp, Homo sapien
tttcaagttatgacctcgtgagagg

SEQ ID NO: 126991 - DNA, 25 bp, Homo sapien
ttacgacacttcaaacccgtgaaag

SEQ ID NO: 126992 - DNA, 25 bp, Homo sapien
ttacgacacttctaacccgtgaaag

SEQ ID NO: 126993 - DNA, 25 bp, Homo sapien
atcacgaacttctgtccccttgaag

SEQ ID NO: 126994 - DNA, 25 bp, Homo sapien
atcacgaacttcagtccccttgaag

SEQ ID NO: 126995 - DNA, 25 bp, Homo sapien
agtccgttcgttgatatgtttatac

SEQ ID NO: 126996 - DNA, 25 bp, Homo sapien
agtccgttcgttcatatgtttatac

SEQ ID NO: 126997 - DNA, 25 bp, Homo sapien
tacagttgtgtttttaggttcactc

SEQ ID NO: 126998 - DNA, 25 bp, Homo sapien
tacagttgtgttattaggttcactc

SEQ ID NO: 126999 - DNA, 25 bp, Homo sapien
acatgtctgttgtctgcttctgtac

SEQ ID NO: 127000 - DNA, 25 bp, Homo sapien
acatgtctgttgactgcttctgtac

SEQ ID NO: 127001 - DNA, 25 bp, Homo sapien
actagtgtttcttatgtccttcacg

SEQ ID NO: 127002 - DNA, 25 bp, Homo sapien
actagtgtttctaatgtccttcacg

SEQ ID NO: 127003 - DNA, 25 bp, Homo sapien
gatctatactctacttgtcttagag

SEQ ID NO: 127004 - DNA, 25 bp, Homo sapien
gatctatactcttcttgtcttagag

SEQ ID NO: 127005 - DNA, 25 bp, Homo sapien
tatccgaacctcctatttaacctca

SEQ ID NO: 127006 - DNA, 25 bp, Homo sapien
tatccgaacctcgtatttaacctca

SEQ ID NO: 127007 - DNA, 25 bp, Homo sapien
tgtacgtccctctgtataaaccgta

SEQ ID NO: 127008 - DNA, 25 bp, Homo sapien
tgtacgtccctcagtataaaccgta

SEQ ID NO: 127009 - DNA, 25 bp, Homo sapien
tgtttccgggcgaaccgtatgtact

SEQ ID NO: 127010 - DNA, 25 bp, Homo sapien
tgtttccgggcgtaccgtatgtact

SEQ ID NO: 127011 - DNA, 25 bp, Homo sapien
atcgacggtcggaactcgtagacta

SEQ ID NO: 127012 - DNA, 25 bp, Homo sapien
atcgacggtcggtactcgtagacta

SEQ ID NO: 127013 - DNA, 25 bp, Homo sapien
atgacttgtgatggtcaatgtcgtc

SEQ ID NO: 127014 - DNA, 25 bp, Homo sapien
atgacttgtgatcgtcaatgtcgtc

SEQ ID NO: 127015 - DNA, 25 bp, Homo sapien
ttctttagagacagtcttaggtatc

SEQ ID NO: 127016 - DNA, 25 bp, Homo sapien
ttctttagagactgtcttaggtatc

SEQ ID NO: 127017 - DNA, 25 bp, Homo sapien
acgtaatggtcgtacgtatactttt

SEQ ID NO: 127018 - DNA, 25 bp, Homo sapien
acgtaatggtcgaacgtatactttt

SEQ ID NO: 127019 - DNA, 25 bp, Homo sapien
gacaactgttagacacacgttactt

SEQ ID NO: 127020 - DNA, 25 bp, Homo sapien
gacaactgttagtcacacgttactt

SEQ ID NO: 127021 - DNA, 25 bp, Homo sapien
gaagacttacttaggtacaatcctt

SEQ ID NO: 127022 - DNA, 25 bp, Homo sapien
gaagacttactttggtacaatcctt

SEQ ID NO: 127023 - DNA, 25 bp, Homo sapien
gggaatttacttttgtcaactcttc

SEQ ID NO: 127024 - DNA, 25 bp, Homo sapien
gggaatttacttatgtcaactcttc

SEQ ID NO: 127025 - DNA, 25 bp, Homo sapien
gattcttcaaacttcgagcgttcac

SEQ ID NO: 127026 - DNA, 25 bp, Homo sapien
gattcttcaaacatcgagcgttcac

SEQ ID NO: 127027 - DNA, 25 bp, Homo sapien
tactgacacactcatgaacctcagt

SEQ ID NO: 127028 - DNA, 25 bp, Homo sapien
tactgacacactgatgaacctcagt

SEQ ID NO: 127029 - DNA, 25 bp, Homo sapien
ttcgtgacaccagtcccatcgttag

SEQ ID NO: 127030 - DNA, 25 bp, Homo sapien
ttcgtgacaccactcccatcgttag

SEQ ID NO: 127031 - DNA, 25 bp, Homo sapien
gcatccgacttcgttaacaatgtta

SEQ ID NO: 127032 - DNA, 25 bp, Homo sapien
gcatccgacttccttaacaatgtta

SEQ ID NO: 127033 - DNA, 25 bp, Homo sapien
agtcctcgtttttgtgcgaagtgcc

SEQ ID NO: 127034 - DNA, 25 bp, Homo sapien
agtcctcgttttagtgcgaagtgcc

SEQ ID NO: 127035 - DNA, 25 bp, Homo sapien
aacccgttgtgtaggtcgagggaac

SEQ ID NO: 127036 - DNA, 25 bp, Homo sapien
aacccgttgtgttggtcgagggaac

SEQ ID NO: 127037 - DNA, 25 bp, Homo sapien
ctccgggtgatcgacacggtgcgtc

SEQ ID NO: 127038 - DNA, 25 bp, Homo sapien
ctccgggtgatccacacggtgcgtc

SEQ ID NO: 127039 - DNA, 25 bp, Homo sapien
gccggtggcatgtacgcccgtcgtc

SEQ ID NO: 127040 - DNA, 25 bp, Homo sapien
gccggtggcatgaacgcccgtcgtc

SEQ ID NO: 127041 - DNA, 25 bp, Homo sapien
ctacgaagtgagtgtgaacggcccc

SEQ ID NO: 127042 - DNA, 25 bp, Homo sapien
ctacgaagtgagagtgaacggcccc

SEQ ID NO: 127043 - DNA, 25 bp, Homo sapien
agacaggattgtagtgttctcctgt

SEQ ID NO: 127044 - DNA, 25 bp, Homo sapien
agacaggattgttgtgttctcctgt

SEQ ID NO: 127045 - DNA, 25 bp, Homo sapien
aataaaaatctgtttcatctgaagt

SEQ ID NO: 127046 - DNA, 25 bp, Homo sapien
aataaaaatctgattcatctgaagt

SEQ ID NO: 127047 - DNA, 25 bp, Homo sapien
aaaacaacgtctgtacagatctgga

SEQ ID NO: 127048 - DNA, 25 bp, Homo sapien
aaaacaacgtctctacagatctgga

SEQ ID NO: 127049 - DNA, 25 bp, Homo sapien
aacattaacaccagaaggtctaaga

SEQ ID NO: 127050 - DNA, 25 bp, Homo sapien
aacattaacacctgaaggtctaaga

SEQ ID NO: 127051 - DNA, 25 bp, Homo sapien
aattttaccggtgatagttatccta

SEQ ID NO: 127052 - DNA, 25 bp, Homo sapien
aattttaccggtcatagttatccta

SEQ ID NO: 127053 - DNA, 25 bp, Homo sapien
acgatcatcccgacgagacttctgt

SEQ ID NO: 127054 - DNA, 25 bp, Homo sapien
acgatcatcccgtcgagacttctgt

SEQ ID NO: 127055 - DNA, 25 bp, Homo sapien
tgaacatcagtgacaccaatgtctt

SEQ ID NO: 127056 - DNA, 25 bp, Homo sapien
tgaacatcagtgtcaccaatgtctt

SEQ ID NO: 127057 - DNA, 25 bp, Homo sapien
aggaagaccagtgtcccggtctggc

SEQ ID NO: 127058 - DNA, 25 bp, Homo sapien
aggaagaccagtctcccggtctggc

SEQ ID NO: 127059 - DNA, 25 bp, Homo sapien
gaaaaacccctcagagggtccgagg

SEQ ID NO: 127060 - DNA, 25 bp, Homo sapien
gaaaaacccctctgagggtccgagg

SEQ ID NO: 127061 - DNA, 25 bp, Homo sapien
tatgtttccggtagagatcccgtct

SEQ ID NO: 127062 - DNA, 25 bp, Homo sapien
tatgtttccggttgagatcccgtct

SEQ ID NO: 127063 - DNA, 25 bp, Homo sapien
ttcacgtacgtcgacacggtcccgt

SEQ ID NO: 127064 - DNA, 25 bp, Homo sapien
ttcacgtacgtccacacggtcccgt

SEQ ID NO: 127065 - DNA, 25 bp, Homo sapien
gacgttgtacatacccctcagtacg

SEQ ID NO: 127066 - DNA, 25 bp, Homo sapien
gacgttgtacattcccctcagtacg

SEQ ID NO: 127067 - DNA, 25 bp, Homo sapien
aagaaacgtcggtccgaatccttgg

SEQ ID NO: 127068 - DNA, 25 bp, Homo sapien
aagaaacgtcggaccgaatccttgg

SEQ ID NO: 127069 - DNA, 25 bp, Homo sapien
atgaagacggcaactgaattttgac

SEQ ID NO: 127070 - DNA, 25 bp, Homo sapien
atgaagacggcatctgaattttgac

SEQ ID NO: 127071 - DNA, 25 bp, Homo sapien
tctgaaacggcctctttctccgtca

SEQ ID NO: 127072 - DNA, 25 bp, Homo sapien
tctgaaacggccactttctccgtca

SEQ ID NO: 127073 - DNA, 25 bp, Homo sapien
ccgaaataaacgtcaccttgttcga

SEQ ID NO: 127074 - DNA, 25 bp, Homo sapien
ccgaaataaacgacaccttgttcga

SEQ ID NO: 127075 - DNA, 25 bp, Homo sapien
cgccaaaggaacctcttcgtctcgg

SEQ ID NO: 127076 - DNA, 25 bp, Homo sapien
cgccaaaggaacgtcttcgtctcgg

SEQ ID NO: 127077 - DNA, 25 bp, Homo sapien
gagagcagcggcacgcccgactgat

SEQ ID NO: 127078 - DNA, 25 bp, Homo sapien
gagagcagcggctcgcccgactgat

SEQ ID NO: 127079 - DNA, 25 bp, Homo sapien
aggtggtgcgacctcctctgtggtc

SEQ ID NO: 127080 - DNA, 25 bp, Homo sapien
aggtggtgcgacgtcctctgtggtc

SEQ ID NO: 127081 - DNA, 25 bp, Homo sapien
acagtgacgaacactccgtcgctct

SEQ ID NO: 127082 - DNA, 25 bp, Homo sapien
acagtgacgaactctccgtcgctct

SEQ ID NO: 127083 - DNA, 25 bp, Homo sapien
atgacggagacgaccgtctgtcccc

SEQ ID NO: 127084 - DNA, 25 bp, Homo sapien
atgacggagacgtccgtctgtcccc

SEQ ID NO: 127085 - DNA, 25 bp, Homo sapien
catcgacggaagagaccagtgccct

SEQ ID NO: 127086 - DNA, 25 bp, Homo sapien
catcgacggaagtgaccagtgccct

SEQ ID NO: 127087 - DNA, 25 bp, Homo sapien
cgtgaaacgaaggtaagtgtcctgt

SEQ ID NO: 127088 - DNA, 25 bp, Homo sapien
cgtgaaacgaagctaagtgtcctgt

SEQ ID NO: 127089 - DNA, 25 bp, Homo sapien
actgaagtagaatacgaagtccgtt

SEQ ID NO: 127090 - DNA, 25 bp, Homo sapien
actgaagtagaaaacgaagtccgtt

SEQ ID NO: 127091 - DNA, 25 bp, Homo sapien
ggaaagggtcccattgagtgcgact

SEQ ID NO: 127092 - DNA, 25 bp, Homo sapien
ggaaagggtccctttgagtgcgact

SEQ ID NO: 127093 - DNA, 25 bp, Homo sapien
aagggaccttctttccacttagact

SEQ ID NO: 127094 - DNA, 25 bp, Homo sapien
aagggaccttctatccacttagact

SEQ ID NO: 127095 - DNA, 25 bp, Homo sapien
ctcttacataagagaccacccgtag

SEQ ID NO: 127096 - DNA, 25 bp, Homo sapien
ctcttacataagtgaccacccgtag

SEQ ID NO: 127097 - DNA, 25 bp, Homo sapien
ggtcactcaagtagaaccactcttc

SEQ ID NO: 127098 - DNA, 25 bp, Homo sapien
ggtcactcaagttgaaccactcttc

SEQ ID NO: 127099 - DNA, 25 bp, Homo sapien
atcgacactgaaggtgaacctccca

SEQ ID NO: 127100 - DNA, 25 bp, Homo sapien
atcgacactgaacgtgaacctccca

SEQ ID NO: 127101 - DNA, 25 bp, Homo sapien
aactgttagactggacctactctcc

SEQ ID NO: 127102 - DNA, 25 bp, Homo sapien
aactgttagactcgacctactctcc

SEQ ID NO: 127103 - DNA, 25 bp, Homo sapien
gacgtaaggtggagtcaaacttgtc

SEQ ID NO: 127104 - DNA, 25 bp, Homo sapien
gacgtaaggtggtgtcaaacttgtc

SEQ ID NO: 127105 - DNA, 25 bp, Homo sapien
aaatgggtcctgagaatcgtagtac

SEQ ID NO: 127106 - DNA, 25 bp, Homo sapien
aaatgggtcctgtgaatcgtagtac

SEQ ID NO: 127107 - DNA, 25 bp, Homo sapien
cttatgtcttctgacgtgaaatgta

SEQ ID NO: 127108 - DNA, 25 bp, Homo sapien
cttatgtcttctcacgtgaaatgta

SEQ ID NO: 127109 - DNA, 25 bp, Homo sapien
gtctctgatctcttggaaatatttc

SEQ ID NO: 127110 - DNA, 25 bp, Homo sapien
gtctctgatctcatggaaatatttc

SEQ ID NO: 127111 - DNA, 25 bp, Homo sapien
tttaactctccgtgttaacttcata

SEQ ID NO: 127112 - DNA, 25 bp, Homo sapien
tttaactctccgagttaacttcata

SEQ ID NO: 127113 - DNA, 25 bp, Homo sapien
ttaaaccttctcagtcaacttcaat

SEQ ID NO: 127114 - DNA, 25 bp, Homo sapien
ttaaaccttctctgtcaacttcaat

SEQ ID NO: 127115 - DNA, 25 bp, Homo sapien
tattaaagagcctgtcataagtcaa

SEQ ID NO: 127116 - DNA, 25 bp, Homo sapien
tattaaagagccagtcataagtcaa

SEQ ID NO: 127117 - DNA, 25 bp, Homo sapien
tggtcaaaccggttatatatctgta

SEQ ID NO: 127118 - DNA, 25 bp, Homo sapien
tggtcaaaccggatatatatctgta

SEQ ID NO: 127119 - DNA, 25 bp, Homo sapien
tctaccggacccactaagtaccgaa

SEQ ID NO: 127120 - DNA, 25 bp, Homo sapien
tctaccggaccctctaagtaccgaa

SEQ ID NO: 127121 - DNA, 25 bp, Homo sapien
atgagaacgtcactaaacagtaacg

SEQ ID NO: 127122 - DNA, 25 bp, Homo sapien
atgagaacgtcagtaaacagtaacg

SEQ ID NO: 127123 - DNA, 25 bp, Homo sapien
tcgacactcggaccacgaacggaag

SEQ ID NO: 127124 - DNA, 25 bp, Homo sapien
tcgacactcggagcacgaacggaag

SEQ ID NO: 127125 - DNA, 25 bp, Homo sapien
tcgtcctcccgtctgacgtgtatcg

SEQ ID NO: 127126 - DNA, 25 bp, Homo sapien
tcgtcctcccgtgtgacgtgtatcg

SEQ ID NO: 127127 - DNA, 25 bp, Homo sapien
gtcgttctctaaccagaatacgaat

SEQ ID NO: 127128 - DNA, 25 bp, Homo sapien
gtcgttctctaagcagaatacgaat

SEQ ID NO: 127129 - DNA, 25 bp, Homo sapien
aatacttgaccaaaccagttagttg

SEQ ID NO: 127130 - DNA, 25 bp, Homo sapien
aatacttgaccataccagttagttg

SEQ ID NO: 127131 - DNA, 25 bp, Homo sapien
ttgtcttttagaattacctcgattg

SEQ ID NO: 127132 - DNA, 25 bp, Homo sapien
ttgtcttttagatttacctcgattg

SEQ ID NO: 127133 - DNA, 25 bp, Homo sapien
ctctgtattcgtgtgtcttcctgtc

SEQ ID NO: 127134 - DNA, 25 bp, Homo sapien
ctctgtattcgtctgtcttcctgtc

SEQ ID NO: 127135 - DNA, 25 bp, Homo sapien
ggttgtcttctgtgtcgacccgtcc

SEQ ID NO: 127136 - DNA, 25 bp, Homo sapien
ggttgtcttctgagtcgacccgtcc

SEQ ID NO: 127137 - DNA, 25 bp, Homo sapien
gtcggggttgcgaccgcgcctacag

SEQ ID NO: 127138 - DNA, 25 bp, Homo sapien
gtcggggttgcgtccgcgcctacag

SEQ ID NO: 127139 - DNA, 25 bp, Homo sapien
gggtcggtcccgtcctcgaactacc

SEQ ID NO: 127140 - DNA, 25 bp, Homo sapien
gggtcggtcccgacctcgaactacc

SEQ ID NO: 127141 - DNA, 25 bp, Homo sapien
cggacggtcccgacgattaacgacc

SEQ ID NO: 127142 - DNA, 25 bp, Homo sapien
cggacggtcccgtcgattaacgacc

SEQ ID NO: 127143 - DNA, 25 bp, Homo sapien
tttgcgacggccaaaccaatataca

SEQ ID NO: 127144 - DNA, 25 bp, Homo sapien
tttgcgacggcctaaccaatataca

SEQ ID NO: 127145 - DNA, 25 bp, Homo sapien
ttgcgaggcttttacggtgatcctg

SEQ ID NO: 127146 - DNA, 25 bp, Homo sapien
ttgcgaggctttaacggtgatcctg

SEQ ID NO: 127147 - DNA, 25 bp, Homo sapien
tgtcacgtcgggtccagggtacccc

SEQ ID NO: 127148 - DNA, 25 bp, Homo sapien
tgtcacgtcgggaccagggtacccc

SEQ ID NO: 127149 - DNA, 25 bp, Homo sapien
tggtcggacgaaacctgagtctcca

SEQ ID NO: 127150 - DNA, 25 bp, Homo sapien
tggtcggacgaatcctgagtctcca

SEQ ID NO: 127151 - DNA, 25 bp, Homo sapien
acggtctacggagatccttgatccc

SEQ ID NO: 127152 - DNA, 25 bp, Homo sapien
acggtctacggacatccttgatccc

SEQ ID NO: 127153 - DNA, 25 bp, Homo sapien
ctagcagaacctctataagacccga

SEQ ID NO: 127154 - DNA, 25 bp, Homo sapien
ctagcagaacctgtataagacccga

SEQ ID NO: 127155 - DNA, 25 bp, Homo sapien
gagtgcgaattctggaccaaaagag

SEQ ID NO: 127156 - DNA, 25 bp, Homo sapien
gagtgcgaattcaggaccaaaagag

SEQ ID NO: 127157 - DNA, 25 bp, Homo sapien
cgttgaaacgacctactcaggaaga

SEQ ID NO: 127158 - DNA, 25 bp, Homo sapien
cgttgaaacgacgtactcaggaaga

SEQ ID NO: 127159 - DNA, 25 bp, Homo sapien
ctccttgaaccgtgtctcgtggaaa

SEQ ID NO: 127160 - DNA, 25 bp, Homo sapien
ctccttgaaccgagtctcgtggaaa

SEQ ID NO: 127161 - DNA, 25 bp, Homo sapien
atcactttaaaagaccgggtcgaat

SEQ ID NO: 127162 - DNA, 25 bp, Homo sapien
atcactttaaaacaccgggtcgaat

SEQ ID NO: 127163 - DNA, 25 bp, Homo sapien
ggagtatatctttcccgataacact

SEQ ID NO: 127164 - DNA, 25 bp, Homo sapien
ggagtatatcttacccgataacact

SEQ ID NO: 127165 - DNA, 25 bp, Homo sapien
gtctgtgtttgtctcgaaactatag

SEQ ID NO: 127166 - DNA, 25 bp, Homo sapien
gtctgtgtttgtgtcgaaactatag

SEQ ID NO: 127167 - DNA, 25 bp, Homo sapien
ttacggagttaaacctccgtttctt

SEQ ID NO: 127168 - DNA, 25 bp, Homo sapien
ttacggagttaatcctccgtttctt

SEQ ID NO: 127169 - DNA, 25 bp, Homo sapien
cttcaagacgtactgccaccacttc

SEQ ID NO: 127170 - DNA, 25 bp, Homo sapien
cttcaagacgtagtgccaccacttc

SEQ ID NO: 127171 - DNA, 25 bp, Homo sapien
ttgtaaatagtagtgcacccctgtc

SEQ ID NO: 127172 - DNA, 25 bp, Homo sapien
ttgtaaatagtactgcacccctgtc

SEQ ID NO: 127173 - DNA, 25 bp, Homo sapien
gagaactcgccgtctcacgaggtcc

SEQ ID NO: 127174 - DNA, 25 bp, Homo sapien
gagaactcgccgactcacgaggtcc

SEQ ID NO: 127175 - DNA, 25 bp, Homo sapien
gagtactcgtggtccaccgctacag

SEQ ID NO: 127176 - DNA, 25 bp, Homo sapien
gagtactcgtggaccaccgctacag

SEQ ID NO: 127177 - DNA, 25 bp, Homo sapien
taggattctgggttgatatccatac

SEQ ID NO: 127178 - DNA, 25 bp, Homo sapien
taggattctgggatgatatccatac

SEQ ID NO: 127179 - DNA, 25 bp, Homo sapien
actggatttcggagtgcagtgaaac

SEQ ID NO: 127180 - DNA, 25 bp, Homo sapien
actggatttcggtgtgcagtgaaac

SEQ ID NO: 127181 - DNA, 25 bp, Homo sapien
aaaactctcggaatcgaagggttca

SEQ ID NO: 127182 - DNA, 25 bp, Homo sapien
aaaactctcggattcgaagggttca

SEQ ID NO: 127183 - DNA, 25 bp, Homo sapien
ggactctccaccagaagtgacccga

SEQ ID NO: 127184 - DNA, 25 bp, Homo sapien
ggactctccacctgaagtgacccga

SEQ ID NO: 127185 - DNA, 25 bp, Homo sapien
ggtctcgacctctccaggtaagtcc

SEQ ID NO: 127186 - DNA, 25 bp, Homo sapien
ggtctcgacctcaccaggtaagtcc

SEQ ID NO: 127187 - DNA, 25 bp, Homo sapien
cttaacatccaacagagtacttaag

SEQ ID NO: 127188 - DNA, 25 bp, Homo sapien
cttaacatccaagagagtacttaag

SEQ ID NO: 127189 - DNA, 25 bp, Homo sapien
tataaatcgaacttgaagactcagg

SEQ ID NO: 127190 - DNA, 25 bp, Homo sapien
tataaatcgaacatgaagactcagg

SEQ ID NO: 127191 - DNA, 25 bp, Homo sapien
acaaatgtacgtgtcacgaatcacc

SEQ ID NO: 127192 - DNA, 25 bp, Homo sapien
acaaatgtacgtctcacgaatcacc

SEQ ID NO: 127193 - DNA, 25 bp, Homo sapien
taagagatgtgtcttgatataagct

SEQ ID NO: 127194 - DNA, 25 bp, Homo sapien
taagagatgtgtgttgatataagct

SEQ ID NO: 127195 - DNA, 25 bp, Homo sapien
taagagaatatctgtccagttgatc

SEQ ID NO: 127196 - DNA, 25 bp, Homo sapien
taagagaatatcagtccagttgatc

SEQ ID NO: 127197 - DNA, 25 bp, Homo sapien
tgtaaggaaaacaaccactgtaaac

SEQ ID NO: 127198 - DNA, 25 bp, Homo sapien
tgtaaggaaaactaccactgtaaac

SEQ ID NO: 127199 - DNA, 25 bp, Homo sapien
tcgaggttaaactcctatacatgat

SEQ ID NO: 127200 - DNA, 25 bp, Homo sapien
tcgaggttaaacacctatacatgat

SEQ ID NO: 127201 - DNA, 25 bp, Homo sapien
gggttcaacgtcaaggtaacgactt

SEQ ID NO: 127202 - DNA, 25 bp, Homo sapien
gggttcaacgtctaggtaacgactt

SEQ ID NO: 127203 - DNA, 25 bp, Homo sapien
gggacaacagactgtgtatacggtt

SEQ ID NO: 127204 - DNA, 25 bp, Homo sapien
gggacaacagacagtgtatacggtt

SEQ ID NO: 127205 - DNA, 25 bp, Homo sapien
cgacgtcctccactagagtaaacgg

SEQ ID NO: 127206 - DNA, 25 bp, Homo sapien
cgacgtcctccagtagagtaaacgg

SEQ ID NO: 127207 - DNA, 25 bp, Homo sapien
tccaccacgtcagtcggagcgagag

SEQ ID NO: 127208 - DNA, 25 bp, Homo sapien
tccaccacgtcactcggagcgagag

SEQ ID NO: 127209 - DNA, 25 bp, Homo sapien
cgtcgttcaagactcgtcagtccgg

SEQ ID NO: 127210 - DNA, 25 bp, Homo sapien
cgtcgttcaagagtcgtcagtccgg

SEQ ID NO: 127211 - DNA, 25 bp, Homo sapien
gtagtgacataggaggacagaccga

SEQ ID NO: 127212 - DNA, 25 bp, Homo sapien
gtagtgacatagcaggacagaccga

SEQ ID NO: 127213 - DNA, 25 bp, Homo sapien
tgggtcactcggaggacgacgtcca

SEQ ID NO: 127214 - DNA, 25 bp, Homo sapien
tgggtcactcggtggacgacgtcca

SEQ ID NO: 127215 - DNA, 25 bp, Homo sapien
agtggtaactctcctagatacccca

SEQ ID NO: 127216 - DNA, 25 bp, Homo sapien
agtggtaactctgctagatacccca

SEQ ID NO: 127217 - DNA, 25 bp, Homo sapien
acgtcggagttcatctgatccttca

SEQ ID NO: 127218 - DNA, 25 bp, Homo sapien
acgtcggagttcttctgatccttca

SEQ ID NO: 127219 - DNA, 25 bp, Homo sapien
cccggttactcgaaaatcgtccttc

SEQ ID NO: 127220 - DNA, 25 bp, Homo sapien
cccggttactcgtaaatcgtccttc

SEQ ID NO: 127221 - DNA, 25 bp, Homo sapien
caccgattagtctaaactgtcaacc

SEQ ID NO: 127222 - DNA, 25 bp, Homo sapien
caccgattagtcaaaactgtcaacc

SEQ ID NO: 127223 - DNA, 25 bp, Homo sapien
acggatcggatcgaaacgcatctcg

SEQ ID NO: 127224 - DNA, 25 bp, Homo sapien
acggatcggatccaaacgcatctcg

SEQ ID NO: 127225 - DNA, 25 bp, Homo sapien
ccggacccgatccagaggtaacctt

SEQ ID NO: 127226 - DNA, 25 bp, Homo sapien
ccggacccgatcgagaggtaacctt

SEQ ID NO: 127227 - DNA, 25 bp, Homo sapien
gctactccaagaacagcgacatcct

SEQ ID NO: 127228 - DNA, 25 bp, Homo sapien
gctactccaagatcagcgacatcct

SEQ ID NO: 127229 - DNA, 25 bp, Homo sapien
gctccaggaggaatcgacggtcagt

SEQ ID NO: 127230 - DNA, 25 bp, Homo sapien
gctccaggaggattcgacggtcagt

SEQ ID NO: 127231 - DNA, 25 bp, Homo sapien
gagctaccacagtgacccgaggtgg

SEQ ID NO: 127232 - DNA, 25 bp, Homo sapien
gagctaccacagagacccgaggtgg

SEQ ID NO: 127233 - DNA, 25 bp, Homo sapien
ggaccggagccttccgtagtatcaa

SEQ ID NO: 127234 - DNA, 25 bp, Homo sapien
ggaccggagcctaccgtagtatcaa

SEQ ID NO: 127235 - DNA, 25 bp, Homo sapien
gggaagtttccgttcctgacttaat

SEQ ID NO: 127236 - DNA, 25 bp, Homo sapien
gggaagtttccgatcctgacttaat

SEQ ID NO: 127237 - DNA, 25 bp, Homo sapien
gagacacgtgttctctttattgact

SEQ ID NO: 127238 - DNA, 25 bp, Homo sapien
gagacacgtgttgtctttattgact

SEQ ID NO: 127239 - DNA, 25 bp, Homo sapien
gaagatgacaacagtttcagcagac

SEQ ID NO: 127240 - DNA, 25 bp, Homo sapien
gaagatgacaactgtttcagcagac

SEQ ID NO: 127241 - DNA, 25 bp, Homo sapien
tgaggatgagacacactgaccccac

SEQ ID NO: 127242 - DNA, 25 bp, Homo sapien
tgaggatgagactcactgaccccac

SEQ ID NO: 127243 - DNA, 25 bp, Homo sapien
gctgaaaggacgaccgacgtagacg

SEQ ID NO: 127244 - DNA, 25 bp, Homo sapien
gctgaaaggacgtccgacgtagacg

SEQ ID NO: 127245 - DNA, 25 bp, Homo sapien
acgtcactacagacagttctgtaag

SEQ ID NO: 127246 - DNA, 25 bp, Homo sapien
acgtcactacagtcagttctgtaag

SEQ ID NO: 127247 - DNA, 25 bp, Homo sapien
agaccggatcaggaggtcgtttaag

SEQ ID NO: 127248 - DNA, 25 bp, Homo sapien
agaccggatcagcaggtcgtttaag

SEQ ID NO: 127249 - DNA, 25 bp, Homo sapien
ttgtgaacaatgacatgtcgcataa

SEQ ID NO: 127250 - DNA, 25 bp, Homo sapien
ttgtgaacaatgtcatgtcgcataa

SEQ ID NO: 127251 - DNA, 25 bp, Homo sapien
ttaggttccattcgatgtctcaaga

SEQ ID NO: 127252 - DNA, 25 bp, Homo sapien
ttaggttccattggatgtctcaaga

SEQ ID NO: 127253 - DNA, 25 bp, Homo sapien
ttatcccgtcttagcttgtgagaca

SEQ ID NO: 127254 - DNA, 25 bp, Homo sapien
ttatcccgtctttgcttgtgagaca

SEQ ID NO: 127255 - DNA, 25 bp, Homo sapien
tctacccgcctaagggttagggcct

SEQ ID NO: 127256 - DNA, 25 bp, Homo sapien
tctacccgcctatgggttagggcct

SEQ ID NO: 127257 - DNA, 25 bp, Homo sapien
tcgcccgcaaccgggaggacggcct

SEQ ID NO: 127258 - DNA, 25 bp, Homo sapien
tcgcccgcaacccggaggacggcct

SEQ ID NO: 127259 - DNA, 25 bp, Homo sapien
ggctcgggcaaacaggatgaccccg

SEQ ID NO: 127260 - DNA, 25 bp, Homo sapien
ggctcgggcaaagaggatgaccccg

SEQ ID NO: 127261 - DNA, 25 bp, Homo sapien
tgtcgtggaggctgggataccccac

SEQ ID NO: 127262 - DNA, 25 bp, Homo sapien
tgtcgtggaggcagggataccccac

SEQ ID NO: 127263 - DNA, 25 bp, Homo sapien
ccctctgtcgggacccagttgggct

SEQ ID NO: 127264 - DNA, 25 bp, Homo sapien
ccctctgtcgggtcccagttgggct

SEQ ID NO: 127265 - DNA, 25 bp, Homo sapien
gaaccccttgtgtcccagacagggc

SEQ ID NO: 127266 - DNA, 25 bp, Homo sapien
gaaccccttgtgacccagacagggc

SEQ ID NO: 127267 - DNA, 25 bp, Homo sapien
ggtggtttcccactgacccgaggtt

SEQ ID NO: 127268 - DNA, 25 bp, Homo sapien
ggtggtttcccagtgacccgaggtt

SEQ ID NO: 127269 - DNA, 25 bp, Homo sapien
tagggttcaatctggtccccgaagg

SEQ ID NO: 127270 - DNA, 25 bp, Homo sapien
tagggttcaatcaggtccccgaagg

SEQ ID NO: 127271 - DNA, 25 bp, Homo sapien
gtagtagaaccataactcgagaagg

SEQ ID NO: 127272 - DNA, 25 bp, Homo sapien
gtagtagaaccaaaactcgagaagg

SEQ ID NO: 127273 - DNA, 25 bp, Homo sapien
gagggtgacacagaaagtgtccgct

SEQ ID NO: 127274 - DNA, 25 bp, Homo sapien
gagggtgacacacaaagtgtccgct

SEQ ID NO: 127275 - DNA, 25 bp, Homo sapien
cggggttaccagacgaagaaaccgt

SEQ ID NO: 127276 - DNA, 25 bp, Homo sapien
cggggttaccagtcgaagaaaccgt

SEQ ID NO: 127277 - DNA, 25 bp, Homo sapien
gactgtatgtgaattacacaatcat

SEQ ID NO: 127278 - DNA, 25 bp, Homo sapien
gactgtatgtgatttacacaatcat

SEQ ID NO: 127279 - DNA, 25 bp, Homo sapien
gtagctgtgactgtacaagttacat

SEQ ID NO: 127280 - DNA, 25 bp, Homo sapien
gtagctgtgactctacaagttacat

SEQ ID NO: 127281 - DNA, 25 bp, Homo sapien
caaggtaggcggacgtcgacgttca

SEQ ID NO: 127282 - DNA, 25 bp, Homo sapien
caaggtaggcggtcgtcgacgttca

SEQ ID NO: 127283 - DNA, 25 bp, Homo sapien
taggcgtcggctcctcgtcgtccgt

SEQ ID NO: 127284 - DNA, 25 bp, Homo sapien
taggcgtcggctgctcgtcgtccgt

SEQ ID NO: 127285 - DNA, 25 bp, Homo sapien
ctgtagtacccgactgactgtcaca

SEQ ID NO: 127286 - DNA, 25 bp, Homo sapien
ctgtagtacccgtctgactgtcaca

SEQ ID NO: 127287 - DNA, 25 bp, Homo sapien
ggtattgctccacctctcttgatag

SEQ ID NO: 127288 - DNA, 25 bp, Homo sapien
ggtattgctccagctctcttgatag

SEQ ID NO: 127289 - DNA, 25 bp, Homo sapien
tgggtctgtcgtctcatccgttggc

SEQ ID NO: 127290 - DNA, 25 bp, Homo sapien
tgggtctgtcgtgtcatccgttggc

SEQ ID NO: 127291 - DNA, 25 bp, Homo sapien
gttgattctgtctacattgcttacc

SEQ ID NO: 127292 - DNA, 25 bp, Homo sapien
gttgattctgtcaacattgcttacc

SEQ ID NO: 127293 - DNA, 25 bp, Homo sapien
gatacatgtctaggattttgcggcc

SEQ ID NO: 127294 - DNA, 25 bp, Homo sapien
gatacatgtctacgattttgcggcc

SEQ ID NO: 127295 - DNA, 25 bp, Homo sapien
gtgagtcaggatagggttcagtccg

SEQ ID NO: 127296 - DNA, 25 bp, Homo sapien
gtgagtcaggattgggttcagtccg

SEQ ID NO: 127297 - DNA, 25 bp, Homo sapien
cgaccatggttcttggcgaaatagg

SEQ ID NO: 127298 - DNA, 25 bp, Homo sapien
cgaccatggttcatggcgaaatagg

SEQ ID NO: 127299 - DNA, 25 bp, Homo sapien
cacacccgtcttcgtcgaagaacgg

SEQ ID NO: 127300 - DNA, 25 bp, Homo sapien
cacacccgtcttggtcgaagaacgg

SEQ ID NO: 127301 - DNA, 25 bp, Homo sapien
gactgagagactttgtcaaacagag

SEQ ID NO: 127302 - DNA, 25 bp, Homo sapien
gactgagagactatgtcaaacagag

SEQ ID NO: 127303 - DNA, 25 bp, Homo sapien
gacgtggtcactcacggcaaacaac

SEQ ID NO: 127304 - DNA, 25 bp, Homo sapien
gacgtggtcactgacggcaaacaac

SEQ ID NO: 127305 - DNA, 25 bp, Homo sapien
cgtcagcatttaacttggtatagga

SEQ ID NO: 127306 - DNA, 25 bp, Homo sapien
cgtcagcatttatcttggtatagga

SEQ ID NO: 127307 - DNA, 25 bp, Homo sapien
ggataaaaagacgtattcatcctat

SEQ ID NO: 127308 - DNA, 25 bp, Homo sapien
ggataaaaagacctattcatcctat

SEQ ID NO: 127309 - DNA, 25 bp, Homo sapien
acgaagagaaagtcattcttcctct

SEQ ID NO: 127310 - DNA, 25 bp, Homo sapien
acgaagagaaagacattcttcctct

SEQ ID NO: 127311 - DNA, 25 bp, Homo sapien
gcgttaaagaaacatgttatccact

SEQ ID NO: 127312 - DNA, 25 bp, Homo sapien
gcgttaaagaaagatgttatccact

SEQ ID NO: 127313 - DNA, 25 bp, Homo sapien
gacgaagaaccctttacttcggtgt

SEQ ID NO: 127314 - DNA, 25 bp, Homo sapien
gacgaagaacccattacttcggtgt

SEQ ID NO: 127315 - DNA, 25 bp, Homo sapien
acaggaacgaaatacttttactagg

SEQ ID NO: 127316 - DNA, 25 bp, Homo sapien
acaggaacgaaaaacttttactagg

SEQ ID NO: 127317 - DNA, 25 bp, Homo sapien
gtcgacgggaacagatccttccgag

SEQ ID NO: 127318 - DNA, 25 bp, Homo sapien
gtcgacgggaactgatccttccgag

SEQ ID NO: 127319 - DNA, 25 bp, Homo sapien
gtctgagtaggaaggaggctcctca

SEQ ID NO: 127320 - DNA, 25 bp, Homo sapien
gtctgagtaggatggaggctcctca

SEQ ID NO: 127321 - DNA, 25 bp, Homo sapien
cgtgtgtttaagttgccgtcactca

SEQ ID NO: 127322 - DNA, 25 bp, Homo sapien
cgtgtgtttaagatgccgtcactca

SEQ ID NO: 127323 - DNA, 25 bp, Homo sapien
tgttgtgtttaccatcgttacaacc

SEQ ID NO: 127324 - DNA, 25 bp, Homo sapien
tgttgtgtttacgatcgttacaacc

SEQ ID NO: 127325 - DNA, 25 bp, Homo sapien
gtgtcttttccgtaggagacataca

SEQ ID NO: 127326 - DNA, 25 bp, Homo sapien
gtgtcttttccgaaggagacataca

SEQ ID NO: 127327 - DNA, 25 bp, Homo sapien
cttctctgcgggaactccgaaccgg

SEQ ID NO: 127328 - DNA, 25 bp, Homo sapien
cttctctgcgggtactccgaaccgg

SEQ ID NO: 127329 - DNA, 25 bp, Homo sapien
tgacccagacttccactccgaaggg

SEQ ID NO: 127330 - DNA, 25 bp, Homo sapien
tgacccagacttgcactccgaaggg

SEQ ID NO: 127331 - DNA, 25 bp, Homo sapien
accggctctaggaccggaactcgag

SEQ ID NO: 127332 - DNA, 25 bp, Homo sapien
accggctctaggtccggaactcgag

SEQ ID NO: 127333 - DNA, 25 bp, Homo sapien
taccgtgactcaactcaaaagaaga

SEQ ID NO: 127334 - DNA, 25 bp, Homo sapien
taccgtgactcatctcaaaagaaga

SEQ ID NO: 127335 - DNA, 25 bp, Homo sapien
ccgtatgtctttcgtaaagtgtatt

SEQ ID NO: 127336 - DNA, 25 bp, Homo sapien
ccgtatgtctttggtaaagtgtatt

SEQ ID NO: 127337 - DNA, 25 bp, Homo sapien
ccttaatggtcgactaaagtattgt

SEQ ID NO: 127338 - DNA, 25 bp, Homo sapien
ccttaatggtcgtctaaagtattgt

SEQ ID NO: 127339 - DNA, 25 bp, Homo sapien
acttcttttaggtatacgaacccag

SEQ ID NO: 127340 - DNA, 25 bp, Homo sapien
acttcttttaggaatacgaacccag

SEQ ID NO: 127341 - DNA, 25 bp, Homo sapien
ctcgttctagggttgtttgacccca

SEQ ID NO: 127342 - DNA, 25 bp, Homo sapien
ctcgttctagggatgtttgacccca

SEQ ID NO: 127343 - DNA, 25 bp, Homo sapien
gatcaagtagattttcatagacccg

SEQ ID NO: 127344 - DNA, 25 bp, Homo sapien
gatcaagtagatattcatagacccg

SEQ ID NO: 127345 - DNA, 25 bp, Homo sapien
atcaccgatatctctcatagtgtgg

SEQ ID NO: 127346 - DNA, 25 bp, Homo sapien
atcaccgatatcactcatagtgtgg

SEQ ID NO: 127347 - DNA, 25 bp, Homo sapien
ctattcttcttcttttgattcttct

SEQ ID NO: 127348 - DNA, 25 bp, Homo sapien
ctattcttcttcatttgattcttct

SEQ ID NO: 127349 - DNA, 25 bp, Homo sapien
ttttcgcttcgctccgcgtgctcat

SEQ ID NO: 127350 - DNA, 25 bp, Homo sapien
ttttcgcttcgcaccgcgtgctcat

SEQ ID NO: 127351 - DNA, 25 bp, Homo sapien
tttgtaaccctctcgacggaccgac

SEQ ID NO: 127352 - DNA, 25 bp, Homo sapien
tttgtaaccctcacgacggaccgac

SEQ ID NO: 127353 - DNA, 25 bp, Homo sapien
tagagacctgtgtacttactagagt

SEQ ID NO: 127354 - DNA, 25 bp, Homo sapien
tagagacctgtgaacttactagagt

SEQ ID NO: 127355 - DNA, 25 bp, Homo sapien
ctgtggatcttaagactctattagt

SEQ ID NO: 127356 - DNA, 25 bp, Homo sapien
ctgtggatcttatgactctattagt

SEQ ID NO: 127357 - DNA, 25 bp, Homo sapien
gaggagtcgacttttatcgggtcgt

SEQ ID NO: 127358 - DNA, 25 bp, Homo sapien
gaggagtcgactattatcgggtcgt

SEQ ID NO: 127359 - DNA, 25 bp, Homo sapien
agggtctacgtggatatacggtatc

SEQ ID NO: 127360 - DNA, 25 bp, Homo sapien
agggtctacgtgcatatacggtatc

SEQ ID NO: 127361 - DNA, 25 bp, Homo sapien
ctatagtgtgtctggacccgggacc

SEQ ID NO: 127362 - DNA, 25 bp, Homo sapien
ctatagtgtgtcaggacccgggacc

SEQ ID NO: 127363 - DNA, 25 bp, Homo sapien
atttaaccggctcaactacgggcga

SEQ ID NO: 127364 - DNA, 25 bp, Homo sapien
atttaaccggctgaactacgggcga

SEQ ID NO: 127365 - DNA, 25 bp, Homo sapien
gtttacagtggagacccgggtcgtc

SEQ ID NO: 127366 - DNA, 25 bp, Homo sapien
gtttacagtggacacccgggtcgtc

SEQ ID NO: 127367 - DNA, 25 bp, Homo sapien
taaaccgagtgacgatcttctgtca

SEQ ID NO: 127368 - DNA, 25 bp, Homo sapien
taaaccgagtgaggatcttctgtca

SEQ ID NO: 127369 - DNA, 25 bp, Homo sapien
gtccgggaccgacctggtctagtgt

SEQ ID NO: 127370 - DNA, 25 bp, Homo sapien
gtccgggaccgagctggtctagtgt

SEQ ID NO: 127371 - DNA, 25 bp, Homo sapien
aaatcctaataaggtcttacttgtg

SEQ ID NO: 127372 - DNA, 25 bp, Homo sapien
aaatcctaataacgtcttacttgtg

SEQ ID NO: 127373 - DNA, 25 bp, Homo sapien
atcacttcacgagttagactttacg

SEQ ID NO: 127374 - DNA, 25 bp, Homo sapien
atcacttcacgacttagactttacg

SEQ ID NO: 127375 - DNA, 25 bp, Homo sapien
ccactcatttgtcgtagttgtgtta

SEQ ID NO: 127376 - DNA, 25 bp, Homo sapien
ccactcatttgtggtagttgtgtta

SEQ ID NO: 127377 - DNA, 25 bp, Homo sapien
caccaggtctcactcgacagtatta

SEQ ID NO: 127378 - DNA, 25 bp, Homo sapien
caccaggtctcagtcgacagtatta

SEQ ID NO: 127379 - DNA, 25 bp, Homo sapien
acggtaaaagactatctctctagtg

SEQ ID NO: 127380 - DNA, 25 bp, Homo sapien
acggtaaaagacaatctctctagtg

SEQ ID NO: 127381 - DNA, 25 bp, Homo sapien
gtgctcaaactgtcactctcctatg

SEQ ID NO: 127382 - DNA, 25 bp, Homo sapien
gtgctcaaactgacactctcctatg

SEQ ID NO: 127383 - DNA, 25 bp, Homo sapien
gtgacttcaaatgcacgttccctca

SEQ ID NO: 127384 - DNA, 25 bp, Homo sapien
gtgacttcaaatccacgttccctca

SEQ ID NO: 127385 - DNA, 25 bp, Homo sapien
ggtgaatcagttactttacatcgat

SEQ ID NO: 127386 - DNA, 25 bp, Homo sapien
ggtgaatcagtttctttacatcgat

SEQ ID NO: 127387 - DNA, 25 bp, Homo sapien
ggctagtctttcatgtgtcgatgat

SEQ ID NO: 127388 - DNA, 25 bp, Homo sapien
ggctagtctttcttgtgtcgatgat

SEQ ID NO: 127389 - DNA, 25 bp, Homo sapien
tgaggattttgttttgttgatgtat

SEQ ID NO: 127390 - DNA, 25 bp, Homo sapien
tgaggattttgtattgttgatgtat

SEQ ID NO: 127391 - DNA, 25 bp, Homo sapien
atgttgactttgtgaaccttccttt

SEQ ID NO: 127392 - DNA, 25 bp, Homo sapien
atgttgactttgagaaccttccttt

SEQ ID NO: 127393 - DNA, 25 bp, Homo sapien
ttcgaccccgaggatcgtttttata

SEQ ID NO: 127394 - DNA, 25 bp, Homo sapien
ttcgaccccgagcatcgtttttata

SEQ ID NO: 127395 - DNA, 25 bp, Homo sapien
aagacacataactcgtgttagaatc

SEQ ID NO: 127396 - DNA, 25 bp, Homo sapien
aagacacataacacgtgttagaatc

SEQ ID NO: 127397 - DNA, 25 bp, Homo sapien
ctaagaaccctcgacgagtaaaatc

SEQ ID NO: 127398 - DNA, 25 bp, Homo sapien
ctaagaaccctccacgagtaaaatc

SEQ ID NO: 127399 - DNA, 25 bp, Homo sapien
gtaaagtccgtctctctccggaacc

SEQ ID NO: 127400 - DNA, 25 bp, Homo sapien
gtaaagtccgtcactctccggaacc

SEQ ID NO: 127401 - DNA, 25 bp, Homo sapien
gctcaggtccggtctttcggagaac

SEQ ID NO: 127402 - DNA, 25 bp, Homo sapien
gctcaggtccggactttcggagaac

SEQ ID NO: 127403 - DNA, 25 bp, Homo sapien
gactcagtggggactttgtcagcga

SEQ ID NO: 127404 - DNA, 25 bp, Homo sapien
gactcagtggggtctttgtcagcga

SEQ ID NO: 127405 - DNA, 25 bp, Homo sapien
gattcgacgggtatcagcttccgga

SEQ ID NO: 127406 - DNA, 25 bp, Homo sapien
gattcgacgggtttcagcttccgga

SEQ ID NO: 127407 - DNA, 25 bp, Homo sapien
aagaacgcaccacgagcttcccgag

SEQ ID NO: 127408 - DNA, 25 bp, Homo sapien
aagaacgcaccaggagcttcccgag

SEQ ID NO: 127409 - DNA, 25 bp, Homo sapien
cggagtctcctggaacctccgtctg

SEQ ID NO: 127410 - DNA, 25 bp, Homo sapien
cggagtctcctgcaacctccgtctg

SEQ ID NO: 127411 - DNA, 25 bp, Homo sapien
ggaggtaatatctacctaccgtatc

SEQ ID NO: 127412 - DNA, 25 bp, Homo sapien
ggaggtaatatcaacctaccgtatc

SEQ ID NO: 127413 - DNA, 25 bp, Homo sapien
acctcgactggataaacatctttcg

SEQ ID NO: 127414 - DNA, 25 bp, Homo sapien
acctcgactggaaaaacatctttcg

SEQ ID NO: 127415 - DNA, 25 bp, Homo sapien
accgctgaagtgacctccactcgag

SEQ ID NO: 127416 - DNA, 25 bp, Homo sapien
accgctgaagtgtcctccactcgag

SEQ ID NO: 127417 - DNA, 25 bp, Homo sapien
acacgttaagggtagactcctggac

SEQ ID NO: 127418 - DNA, 25 bp, Homo sapien
acacgttaagggaagactcctggac

SEQ ID NO: 127419 - DNA, 25 bp, Homo sapien
ctacctaaaggcaacgacacaagga

SEQ ID NO: 127420 - DNA, 25 bp, Homo sapien
ctacctaaaggctacgacacaagga

SEQ ID NO: 127421 - DNA, 25 bp, Homo sapien
gtcgtcgttatctccccaaggagag

SEQ ID NO: 127422 - DNA, 25 bp, Homo sapien
gtcgtcgttatcaccccaaggagag

SEQ ID NO: 127423 - DNA, 25 bp, Homo sapien
ccattactctactaccgaaggagag

SEQ ID NO: 127424 - DNA, 25 bp, Homo sapien
ccattactctacaaccgaaggagag

SEQ ID NO: 127425 - DNA, 25 bp, Homo sapien
atgtaaccacgtacgctaagaaacg

SEQ ID NO: 127426 - DNA, 25 bp, Homo sapien
atgtaaccacgttcgctaagaaacg

SEQ ID NO: 127427 - DNA, 25 bp, Homo sapien
aggtacctcagctactccaagaaca

SEQ ID NO: 127428 - DNA, 25 bp, Homo sapien
aggtacctcagcaactccaagaaca

SEQ ID NO: 127429 - DNA, 25 bp, Homo sapien
agagagccaccgtgtaccaatggca

SEQ ID NO: 127430 - DNA, 25 bp, Homo sapien
agagagccaccgagtaccaatggca

SEQ ID NO: 127431 - DNA, 25 bp, Homo sapien
gagtcctggactcactataactccc

SEQ ID NO: 127432 - DNA, 25 bp, Homo sapien
gagtcctggactgactataactccc

SEQ ID NO: 127433 - DNA, 25 bp, Homo sapien
atcagacataggtccggaactcctc

SEQ ID NO: 127434 - DNA, 25 bp, Homo sapien
atcagacataggaccggaactcctc

SEQ ID NO: 127435 - DNA, 25 bp, Homo sapien
agacagtcctataccgaagacccca

SEQ ID NO: 127436 - DNA, 25 bp, Homo sapien
agacagtcctattccgaagacccca

SEQ ID NO: 127437 - DNA, 25 bp, Homo sapien
aagacgagtttgtcggcggccaaca

SEQ ID NO: 127438 - DNA, 25 bp, Homo sapien
aagacgagtttgacggcggccaaca

SEQ ID NO: 127439 - DNA, 25 bp, Homo sapien
gagactgttaaacgtgttcaagaca

SEQ ID NO: 127440 - DNA, 25 bp, Homo sapien
gagactgttaaaggtgttcaagaca

SEQ ID NO: 127441 - DNA, 25 bp, Homo sapien
aacttgatagggttcttacagctct

SEQ ID NO: 127442 - DNA, 25 bp, Homo sapien
aacttgatagggatcttacagctct

SEQ ID NO: 127443 - DNA, 25 bp, Homo sapien
tagattgttgggtatatcaccgatc

SEQ ID NO: 127444 - DNA, 25 bp, Homo sapien
tagattgttgggaatatcaccgatc

SEQ ID NO: 127445 - DNA, 25 bp, Homo sapien
tttagggtagtgacatcgaccgttt

SEQ ID NO: 127446 - DNA, 25 bp, Homo sapien
tttagggtagtgtcatcgaccgttt

SEQ ID NO: 127447 - DNA, 25 bp, Homo sapien
tcggtgagtgtgactgacccgagtt

SEQ ID NO: 127448 - DNA, 25 bp, Homo sapien
tcggtgagtgtgtctgacccgagtt

SEQ ID NO: 127449 - DNA, 25 bp, Homo sapien
gtctctgtggggttctcgacccatt

SEQ ID NO: 127450 - DNA, 25 bp, Homo sapien
gtctctgtggggatctcgacccatt

SEQ ID NO: 127451 - DNA, 25 bp, Homo sapien
tagtctgtctggtccgcgcgcggta

SEQ ID NO: 127452 - DNA, 25 bp, Homo sapien
tagtctgtctggaccgcgcgcggta

SEQ ID NO: 127453 - DNA, 25 bp, Homo sapien
taccggtgtcgctccggctacgtca

SEQ ID NO: 127454 - DNA, 25 bp, Homo sapien
taccggtgtcgcaccggctacgtca

SEQ ID NO: 127455 - DNA, 25 bp, Homo sapien
gcaacggactacaggtaggtcccca

SEQ ID NO: 127456 - DNA, 25 bp, Homo sapien
gcaacggactactggtaggtcccca

SEQ ID NO: 127457 - DNA, 25 bp, Homo sapien
accgtgaacgttacgggtacccttc

SEQ ID NO: 127458 - DNA, 25 bp, Homo sapien
accgtgaacgtttcgggtacccttc

SEQ ID NO: 127459 - DNA, 25 bp, Homo sapien
gtcttataattctgggacttctctc

SEQ ID NO: 127460 - DNA, 25 bp, Homo sapien
gtcttataattcagggacttctctc

SEQ ID NO: 127461 - DNA, 25 bp, Homo sapien
gctcgtaatgtgaggtcagggacct

SEQ ID NO: 127462 - DNA, 25 bp, Homo sapien
gctcgtaatgtgtggtcagggacct

SEQ ID NO: 127463 - DNA, 25 bp, Homo sapien
gagtttcaggagtccgtgacacagt

SEQ ID NO: 127464 - DNA, 25 bp, Homo sapien
gagtttcaggagaccgtgacacagt

SEQ ID NO: 127465 - DNA, 25 bp, Homo sapien
tcacagtcttcgtccccagcaagag

SEQ ID NO: 127466 - DNA, 25 bp, Homo sapien
tcacagtcttcgaccccagcaagag

SEQ ID NO: 127467 - DNA, 25 bp, Homo sapien
ccgggactcgtggaccccaaaggac

SEQ ID NO: 127468 - DNA, 25 bp, Homo sapien
ccgggactcgtgcaccccaaaggac

SEQ ID NO: 127469 - DNA, 25 bp, Homo sapien
tggaaactctcgactcccaagagcc

SEQ ID NO: 127470 - DNA, 25 bp, Homo sapien
tggaaactctcgtctcccaagagcc

SEQ ID NO: 127471 - DNA, 25 bp, Homo sapien
ttactcggctaccacataagagtct

SEQ ID NO: 127472 - DNA, 25 bp, Homo sapien
ttactcggctacgacataagagtct

SEQ ID NO: 127473 - DNA, 25 bp, Homo sapien
atttctgtcgtctaagagtgacttg

SEQ ID NO: 127474 - DNA, 25 bp, Homo sapien
atttctgtcgtcaaagagtgacttg

SEQ ID NO: 127475 - DNA, 25 bp, Homo sapien
tcgctggtaactctaaactagccat

SEQ ID NO: 127476 - DNA, 25 bp, Homo sapien
tcgctggtaactgtaaactagccat

SEQ ID NO: 127477 - DNA, 25 bp, Homo sapien
tccaggatctcgtcgaagacggacc

SEQ ID NO: 127478 - DNA, 25 bp, Homo sapien
tccaggatctcgacgaagacggacc

SEQ ID NO: 127479 - DNA, 25 bp, Homo sapien
ttgcatgagaccaaccgaaggaagt

SEQ ID NO: 127480 - DNA, 25 bp, Homo sapien
ttgcatgagacctaccgaaggaagt

SEQ ID NO: 127481 - DNA, 25 bp, Homo sapien
tccctgacgcaccttgagaagaaga

SEQ ID NO: 127482 - DNA, 25 bp, Homo sapien
tccctgacgcacgttgagaagaaga

SEQ ID NO: 127483 - DNA, 25 bp, Homo sapien
acgccgacgcgaacgcgaagaacgg

SEQ ID NO: 127484 - DNA, 25 bp, Homo sapien
acgccgacgcgatcgcgaagaacgg

SEQ ID NO: 127485 - DNA, 25 bp, Homo sapien
cctaccgtctagagaacgggtcgta

SEQ ID NO: 127486 - DNA, 25 bp, Homo sapien
cctaccgtctagtgaacgggtcgta

SEQ ID NO: 127487 - DNA, 25 bp, Homo sapien
gaactaatatcttgtaacacggacc

SEQ ID NO: 127488 - DNA, 25 bp, Homo sapien
gaactaatatctagtaacacggacc

SEQ ID NO: 127489 - DNA, 25 bp, Homo sapien
ggatcacaccctgagatcacggagg

SEQ ID NO: 127490 - DNA, 25 bp, Homo sapien
ggatcacaccctcagatcacggagg

SEQ ID NO: 127491 - DNA, 25 bp, Homo sapien
acataggtcctcgacgcccgtcagg

SEQ ID NO: 127492 - DNA, 25 bp, Homo sapien
acataggtcctccacgcccgtcagg

SEQ ID NO: 127493 - DNA, 25 bp, Homo sapien
cccacgggccagaagcagggtgtct

SEQ ID NO: 127494 - DNA, 25 bp, Homo sapien
cccacgggccagtagcagggtgtct

SEQ ID NO: 127495 - DNA, 25 bp, Homo sapien
gctaccccacgaggaccgaaggtat

SEQ ID NO: 127496 - DNA, 25 bp, Homo sapien
gctaccccacgacgaccgaaggtat

SEQ ID NO: 127497 - DNA, 25 bp, Homo sapien
ctagtgcccgacgactcgaccgtgg

SEQ ID NO: 127498 - DNA, 25 bp, Homo sapien
ctagtgcccgaccactcgaccgtgg

SEQ ID NO: 127499 - DNA, 25 bp, Homo sapien
tctcgccctcggtgtcagtagcggt

SEQ ID NO: 127500 - DNA, 25 bp, Homo sapien
tctcgccctcggagtcagtagcggt

SEQ ID NO: 127501 - DNA, 25 bp, Homo sapien
gtcggtcccaggtagacagacagat

SEQ ID NO: 127502 - DNA, 25 bp, Homo sapien
gtcggtcccaggaagacagacagat

SEQ ID NO: 127503 - DNA, 25 bp, Homo sapien
acgagtccctcaaagtataacagtt

SEQ ID NO: 127504 - DNA, 25 bp, Homo sapien
acgagtccctcatagtataacagtt

SEQ ID NO: 127505 - DNA, 25 bp, Homo sapien
ttcgcgaacctcgtgacttaccttt

SEQ ID NO: 127506 - DNA, 25 bp, Homo sapien
ttcgcgaacctcctgacttaccttt

SEQ ID NO: 127507 - DNA, 25 bp, Homo sapien
tgtacacgaccctatgtatactctg

SEQ ID NO: 127508 - DNA, 25 bp, Homo sapien
tgtacacgacccaatgtatactctg

SEQ ID NO: 127509 - DNA, 25 bp, Homo sapien
tagtcgtcccaggtaaagcttacta

SEQ ID NO: 127510 - DNA, 25 bp, Homo sapien
tagtcgtcccagctaaagcttacta

SEQ ID NO: 127511 - DNA, 25 bp, Homo sapien
tctgtccctctctatgacgttcgta

SEQ ID NO: 127512 - DNA, 25 bp, Homo sapien
tctgtccctctcaatgacgttcgta

SEQ ID NO: 127513 - DNA, 25 bp, Homo sapien
cctcgtcgtcgagaagaacgtcctc

SEQ ID NO: 127514 - DNA, 25 bp, Homo sapien
cctcgtcgtcgacaagaacgtcctc

SEQ ID NO: 127515 - DNA, 25 bp, Homo sapien
agacgtctttctcagggaaggttcc

SEQ ID NO: 127516 - DNA, 25 bp, Homo sapien
agacgtctttctgagggaaggttcc

SEQ ID NO: 127517 - DNA, 25 bp, Homo sapien
ctttataggcgtaggtcggtacacg

SEQ ID NO: 127518 - DNA, 25 bp, Homo sapien
ctttataggcgttggtcggtacacg

SEQ ID NO: 127519 - DNA, 25 bp, Homo sapien
gtttataaggtaggatacgtcgtcc

SEQ ID NO: 127520 - DNA, 25 bp, Homo sapien
gtttataaggtacgatacgtcgtcc

SEQ ID NO: 127521 - DNA, 25 bp, Homo sapien
gtgtgacttaggacgcacgcgtctt

SEQ ID NO: 127522 - DNA, 25 bp, Homo sapien
gtgtgacttaggtcgcacgcgtctt

SEQ ID NO: 127523 - DNA, 25 bp, Homo sapien
atgggtgtttatgttgttaccgtcc

SEQ ID NO: 127524 - DNA, 25 bp, Homo sapien
atgggtgtttatcttgttaccgtcc

SEQ ID NO: 127525 - DNA, 25 bp, Homo sapien
tttaatgtacttcgattgggacttc

SEQ ID NO: 127526 - DNA, 25 bp, Homo sapien
tttaatgtacttggattgggacttc

SEQ ID NO: 127527 - DNA, 25 bp, Homo sapien
ttattagtctgtcagggggtctgtc

SEQ ID NO: 127528 - DNA, 25 bp, Homo sapien
ttattagtctgtgagggggtctgtc

SEQ ID NO: 127529 - DNA, 25 bp, Homo sapien
ttatatgtgtatacgtagagacccg

SEQ ID NO: 127530 - DNA, 25 bp, Homo sapien
ttatatgtgtattcgtagagacccg

SEQ ID NO: 127531 - DNA, 25 bp, Homo sapien
tacttctaccaggtagagacatcgt

SEQ ID NO: 127532 - DNA, 25 bp, Homo sapien
tacttctaccagctagagacatcgt

SEQ ID NO: 127533 - DNA, 25 bp, Homo sapien
cgtaccttaggacgtcgtactcttt

SEQ ID NO: 127534 - DNA, 25 bp, Homo sapien
cgtaccttaggaggtcgtactcttt

SEQ ID NO: 127535 - DNA, 25 bp, Homo sapien
cgacacaccgctggtgagtgagtgt

SEQ ID NO: 127536 - DNA, 25 bp, Homo sapien
cgacacaccgctcgtgagtgagtgt

SEQ ID NO: 127537 - DNA, 25 bp, Homo sapien
cggaagaacccttcgacctaacgtc

SEQ ID NO: 127538 - DNA, 25 bp, Homo sapien
cggaagaaccctacgacctaacgtc

SEQ ID NO: 127539 - DNA, 25 bp, Homo sapien
tgtttgaggacagtaccccctgaga

SEQ ID NO: 127540 - DNA, 25 bp, Homo sapien
tgtttgaggacactaccccctgaga

SEQ ID NO: 127541 - DNA, 25 bp, Homo sapien
gtgttgtgaatattcaatctctcaa

SEQ ID NO: 127542 - DNA, 25 bp, Homo sapien
gtgttgtgaataatcaatctctcaa

SEQ ID NO: 127543 - DNA, 25 bp, Homo sapien
tctgaacaggaaacttatttccgaa

SEQ ID NO: 127544 - DNA, 25 bp, Homo sapien
tctgaacaggaatcttatttccgaa

SEQ ID NO: 127545 - DNA, 25 bp, Homo sapien
gaaagaaagaatcactattctccaa

SEQ ID NO: 127546 - DNA, 25 bp, Homo sapien
gaaagaaagaatgactattctccaa

SEQ ID NO: 127547 - DNA, 25 bp, Homo sapien
tgaaatgtatacgaattcttccttg

SEQ ID NO: 127548 - DNA, 25 bp, Homo sapien
tgaaatgtataccaattcttccttg

SEQ ID NO: 127549 - DNA, 25 bp, Homo sapien
aacaatacgtacactcgccaattgg

SEQ ID NO: 127550 - DNA, 25 bp, Homo sapien
aacaatacgtactctcgccaattgg

SEQ ID NO: 127551 - DNA, 25 bp, Homo sapien
tgagcctcctctccaacatacgtgg

SEQ ID NO: 127552 - DNA, 25 bp, Homo sapien
tgagcctcctctgcaacatacgtgg

SEQ ID NO: 127553 - DNA, 25 bp, Homo sapien
cgaggtagcctccacaggatgacct

SEQ ID NO: 127554 - DNA, 25 bp, Homo sapien
cgaggtagcctcgacaggatgacct

SEQ ID NO: 127555 - DNA, 25 bp, Homo sapien
cattataagtcgagggactcgactc

SEQ ID NO: 127556 - DNA, 25 bp, Homo sapien
cattataagtcgtgggactcgactc

SEQ ID NO: 127557 - DNA, 25 bp, Homo sapien
acacattttgtgttgaaaccagact

SEQ ID NO: 127558 - DNA, 25 bp, Homo sapien
acacattttgtgatgaaaccagact

SEQ ID NO: 127559 - DNA, 25 bp, Homo sapien
acaacttcctgtgttcgagaccgga

SEQ ID NO: 127560 - DNA, 25 bp, Homo sapien
acaacttcctgtcttcgagaccgga

SEQ ID NO: 127561 - DNA, 25 bp, Homo sapien
accatgtccatgaggaaccggacgt

SEQ ID NO: 127562 - DNA, 25 bp, Homo sapien
accatgtccatgtggaaccggacgt

SEQ ID NO: 127563 - DNA, 25 bp, Homo sapien
ctttcgagtccctaggacccggtac

SEQ ID NO: 127564 - DNA, 25 bp, Homo sapien
ctttcgagtcccaaggacccggtac

SEQ ID NO: 127565 - DNA, 25 bp, Homo sapien
gttcctcccaaggtactgtccgtac

SEQ ID NO: 127566 - DNA, 25 bp, Homo sapien
gttcctcccaagctactgtccgtac

SEQ ID NO: 127567 - DNA, 25 bp, Homo sapien
gtaactctgttcgagatctgtcatc

SEQ ID NO: 127568 - DNA, 25 bp, Homo sapien
gtaactctgttccagatctgtcatc

SEQ ID NO: 127569 - DNA, 25 bp, Homo sapien
ctcctctaagtggatttgtctcgtc

SEQ ID NO: 127570 - DNA, 25 bp, Homo sapien
ctcctctaagtgcatttgtctcgtc

SEQ ID NO: 127571 - DNA, 25 bp, Homo sapien
cttccggaagggtgtaagtcgtgta

SEQ ID NO: 127572 - DNA, 25 bp, Homo sapien
cttccggaagggagtaagtcgtgta

SEQ ID NO: 127573 - DNA, 25 bp, Homo sapien
cccctgactacgagggttaacaagt

SEQ ID NO: 127574 - DNA, 25 bp, Homo sapien
cccctgactacgtgggttaacaagt

SEQ ID NO: 127575 - DNA, 25 bp, Homo sapien
ccctaaagttcacgtctgactaccg

SEQ ID NO: 127576 - DNA, 25 bp, Homo sapien
ccctaaagttcaggtctgactaccg

SEQ ID NO: 127577 - DNA, 25 bp, Homo sapien
actgtagtagttcgacctactcggc

SEQ ID NO: 127578 - DNA, 25 bp, Homo sapien
actgtagtagttggacctactcggc

SEQ ID NO: 127579 - DNA, 25 bp, Homo sapien
agacgtaatgttgactacagtggtc

SEQ ID NO: 127580 - DNA, 25 bp, Homo sapien
agacgtaatgttcactacagtggtc

SEQ ID NO: 127581 - DNA, 25 bp, Homo sapien
aataatccctggacgtctctccgtc

SEQ ID NO: 127582 - DNA, 25 bp, Homo sapien
aataatccctggtcgtctctccgtc

SEQ ID NO: 127583 - DNA, 25 bp, Homo sapien
ttggataacctttccgttctcgctc

SEQ ID NO: 127584 - DNA, 25 bp, Homo sapien
ttggataaccttaccgttctcgctc

SEQ ID NO: 127585 - DNA, 25 bp, Homo sapien
taatccgtcttaggtctacgagttc

SEQ ID NO: 127586 - DNA, 25 bp, Homo sapien
taatccgtcttacgtctacgagttc

SEQ ID NO: 127587 - DNA, 25 bp, Homo sapien
ccctatgtctgaggtggttacagaa

SEQ ID NO: 127588 - DNA, 25 bp, Homo sapien
ccctatgtctgacgtggttacagaa

SEQ ID NO: 127589 - DNA, 25 bp, Homo sapien
gtgtccttccttttgtcatcgatca

SEQ ID NO: 127590 - DNA, 25 bp, Homo sapien
gtgtccttccttatgtcatcgatca

SEQ ID NO: 127591 - DNA, 25 bp, Homo sapien
cttcaagtgacttgaatcccgctaa

SEQ ID NO: 127592 - DNA, 25 bp, Homo sapien
cttcaagtgactagaatcccgctaa

SEQ ID NO: 127593 - DNA, 25 bp, Homo sapien
gtaaaggacccgaacccttttacgt

SEQ ID NO: 127594 - DNA, 25 bp, Homo sapien
gtaaaggacccgtacccttttacgt

SEQ ID NO: 127595 - DNA, 25 bp, Homo sapien
gaacgacctgtcttctacagcaact

SEQ ID NO: 127596 - DNA, 25 bp, Homo sapien
gaacgacctgtcatctacagcaact

SEQ ID NO: 127597 - DNA, 25 bp, Homo sapien
tagaagtacgtgagctacgaccctc

SEQ ID NO: 127598 - DNA, 25 bp, Homo sapien
tagaagtacgtgtgctacgaccctc

SEQ ID NO: 127599 - DNA, 25 bp, Homo sapien
tgtaaataactctcgtgtcacccca

SEQ ID NO: 127600 - DNA, 25 bp, Homo sapien
tgtaaataactcacgtgtcacccca

SEQ ID NO: 127601 - DNA, 25 bp, Homo sapien
tagagagtcttttcggtcaagtcca

SEQ ID NO: 127602 - DNA, 25 bp, Homo sapien
tagagagtctttacggtcaagtcca

SEQ ID NO: 127603 - DNA, 25 bp, Homo sapien
ccgaattatatgtccgcattccagt

SEQ ID NO: 127604 - DNA, 25 bp, Homo sapien
ccgaattatatgaccgcattccagt

SEQ ID NO: 127605 - DNA, 25 bp, Homo sapien
cacaacgtcaacgactacttcaggt

SEQ ID NO: 127606 - DNA, 25 bp, Homo sapien
cacaacgtcaaccactacttcaggt

SEQ ID NO: 127607 - DNA, 25 bp, Homo sapien
gaaacagaacacaaccctcagggtg

SEQ ID NO: 127608 - DNA, 25 bp, Homo sapien
gaaacagaacactaccctcagggtg

SEQ ID NO: 127609 - DNA, 25 bp, Homo sapien
tgaaagaagaacgacccaagcggag

SEQ ID NO: 127610 - DNA, 25 bp, Homo sapien
tgaaagaagaaccacccaagcggag

SEQ ID NO: 127611 - DNA, 25 bp, Homo sapien
agagaaataagaggtgcccacgaaa

SEQ ID NO: 127612 - DNA, 25 bp, Homo sapien
agagaaataagacgtgcccacgaaa

SEQ ID NO: 127613 - DNA, 25 bp, Homo sapien
gagtttaactataggcaccgtgaaa

SEQ ID NO: 127614 - DNA, 25 bp, Homo sapien
gagtttaactattggcaccgtgaaa

SEQ ID NO: 127615 - DNA, 25 bp, Homo sapien
gtcctgtctatgagttctgtgagaa

SEQ ID NO: 127616 - DNA, 25 bp, Homo sapien
gtcctgtctatgtgttctgtgagaa

SEQ ID NO: 127617 - DNA, 25 bp, Homo sapien
cgtttgtcagggtacagagaacata

SEQ ID NO: 127618 - DNA, 25 bp, Homo sapien
cgtttgtcagggaacagagaacata

SEQ ID NO: 127619 - DNA, 25 bp, Homo sapien
attttctaaggtccttcgaaactcg

SEQ ID NO: 127620 - DNA, 25 bp, Homo sapien
attttctaaggtgcttcgaaactcg

SEQ ID NO: 127621 - DNA, 25 bp, Homo sapien
atcttcgtcaagagtttctcgaatc

SEQ ID NO: 127622 - DNA, 25 bp, Homo sapien
atcttcgtcaagtgtttctcgaatc

SEQ ID NO: 127623 - DNA, 25 bp, Homo sapien
gtctccttaaattccttgagaacgt

SEQ ID NO: 127624 - DNA, 25 bp, Homo sapien
gtctccttaaataccttgagaacgt

SEQ ID NO: 127625 - DNA, 25 bp, Homo sapien
cttcccgtatcctcctctggagcgt

SEQ ID NO: 127626 - DNA, 25 bp, Homo sapien
cttcccgtatccacctctggagcgt

SEQ ID NO: 127627 - DNA, 25 bp, Homo sapien
gtctcacttcttacccggagtacag

SEQ ID NO: 127628 - DNA, 25 bp, Homo sapien
gtctcacttctttcccggagtacag

SEQ ID NO: 127629 - DNA, 25 bp, Homo sapien
tcacgatattcttccccgtagaggg

SEQ ID NO: 127630 - DNA, 25 bp, Homo sapien
tcacgatattctaccccgtagaggg

SEQ ID NO: 127631 - DNA, 25 bp, Homo sapien
tgtccgttcttgttactggaagtct

SEQ ID NO: 127632 - DNA, 25 bp, Homo sapien
tgtccgttcttgatactggaagtct

SEQ ID NO: 127633 - DNA, 25 bp, Homo sapien
tgagttcgttattttacggaaacct

SEQ ID NO: 127634 - DNA, 25 bp, Homo sapien
tgagttcgttatattacggaaacct

SEQ ID NO: 127635 - DNA, 25 bp, Homo sapien
agttctgttacattacgatttgact

SEQ ID NO: 127636 - DNA, 25 bp, Homo sapien
agttctgttacaatacgatttgact

SEQ ID NO: 127637 - DNA, 25 bp, Homo sapien
atacgtgttgtcattcgtatcttga

SEQ ID NO: 127638 - DNA, 25 bp, Homo sapien
atacgtgttgtctttcgtatcttga

SEQ ID NO: 127639 - DNA, 25 bp, Homo sapien
aaggtcttctcgtctcttttagagt

SEQ ID NO: 127640 - DNA, 25 bp, Homo sapien
aaggtcttctcgactcttttagagt

SEQ ID NO: 127641 - DNA, 25 bp, Homo sapien
aaagacacctcctctattactctca

SEQ ID NO: 127642 - DNA, 25 bp, Homo sapien
aaagacacctccactattactctca

SEQ ID NO: 127643 - DNA, 25 bp, Homo sapien
tttcgtacccccttacgtaaaccgg

SEQ ID NO: 127644 - DNA, 25 bp, Homo sapien
tttcgtacccccatacgtaaaccgg

SEQ ID NO: 127645 - DNA, 25 bp, Homo sapien
tgtgttcccgtcgaacgtcatgtat

SEQ ID NO: 127646 - DNA, 25 bp, Homo sapien
tgtgttcccgtccaacgtcatgtat

SEQ ID NO: 127647 - DNA, 25 bp, Homo sapien
ccatgccgtcggtcgtctactgtat

SEQ ID NO: 127648 - DNA, 25 bp, Homo sapien
ccatgccgtcggacgtctactgtat

SEQ ID NO: 127649 - DNA, 25 bp, Homo sapien
ataacgtttgaaagcaatgtcgtct

SEQ ID NO: 127650 - DNA, 25 bp, Homo sapien
ataacgtttgaatgcaatgtcgtct

SEQ ID NO: 127651 - DNA, 25 bp, Homo sapien
tacgtacattgaagtgtcatatttc

SEQ ID NO: 127652 - DNA, 25 bp, Homo sapien
tacgtacattgatgtgtcatatttc

SEQ ID NO: 127653 - DNA, 25 bp, Homo sapien
gaacacgtggtctgtacgtattttt

SEQ ID NO: 127654 - DNA, 25 bp, Homo sapien
gaacacgtggtcagtacgtattttt

SEQ ID NO: 127655 - DNA, 25 bp, Homo sapien
gacactactgtaagggacgattatt

SEQ ID NO: 127656 - DNA, 25 bp, Homo sapien
gacactactgtatgggacgattatt

SEQ ID NO: 127657 - DNA, 25 bp, Homo sapien
gatagcttcttcagcgttgatgttt

SEQ ID NO: 127658 - DNA, 25 bp, Homo sapien
gatagcttcttctgcgttgatgttt

SEQ ID NO: 127659 - DNA, 25 bp, Homo sapien
gacatttactttcgttagaccgttt

SEQ ID NO: 127660 - DNA, 25 bp, Homo sapien
gacatttactttggttagaccgttt

SEQ ID NO: 127661 - DNA, 25 bp, Homo sapien
aagaactttcatgttcgaggtctcc

SEQ ID NO: 127662 - DNA, 25 bp, Homo sapien
aagaactttcatcttcgaggtctcc

SEQ ID NO: 127663 - DNA, 25 bp, Homo sapien
aagtgcacctttagactctctacgt

SEQ ID NO: 127664 - DNA, 25 bp, Homo sapien
aagtgcaccttttgactctctacgt

SEQ ID NO: 127665 - DNA, 25 bp, Homo sapien
acctgtcactcacgtctccatcttg

SEQ ID NO: 127666 - DNA, 25 bp, Homo sapien
acctgtcactcaggtctccatcttg

SEQ ID NO: 127667 - DNA, 25 bp, Homo sapien
caaccgtttctggtgtaaatcgtta

SEQ ID NO: 127668 - DNA, 25 bp, Homo sapien
caaccgtttctgctgtaaatcgtta

SEQ ID NO: 127669 - DNA, 25 bp, Homo sapien
gggtctccgttcttgatggaattcc

SEQ ID NO: 127670 - DNA, 25 bp, Homo sapien
gggtctccgttcatgatggaattcc

SEQ ID NO: 127671 - DNA, 25 bp, Homo sapien
tgcccgtttgtcagggaaggtatgt

SEQ ID NO: 127672 - DNA, 25 bp, Homo sapien
tgcccgtttgtctgggaaggtatgt

SEQ ID NO: 127673 - DNA, 25 bp, Homo sapien
cccggtgtagtactggaccggcgtt

SEQ ID NO: 127674 - DNA, 25 bp, Homo sapien
cccggtgtagtagtggaccggcgtt

SEQ ID NO: 127675 - DNA, 25 bp, Homo sapien
cggcaccgggaattggacccgtctc

SEQ ID NO: 127676 - DNA, 25 bp, Homo sapien
cggcaccgggaaatggacccgtctc

SEQ ID NO: 127677 - DNA, 25 bp, Homo sapien
agtcaagtgaggagtccgcgcctcc

SEQ ID NO: 127678 - DNA, 25 bp, Homo sapien
agtcaagtgaggtgtccgcgcctcc

SEQ ID NO: 127679 - DNA, 25 bp, Homo sapien
atagaaaatggtctcgttcctctgt

SEQ ID NO: 127680 - DNA, 25 bp, Homo sapien
atagaaaatggtgtcgttcctctgt

SEQ ID NO: 127681 - DNA, 25 bp, Homo sapien
aattaaaatcggtttagaactcgaa

SEQ ID NO: 127682 - DNA, 25 bp, Homo sapien
aattaaaatcggattagaactcgaa

SEQ ID NO: 127683 - DNA, 25 bp, Homo sapien
aaaacaaggtagacgacatactgga

SEQ ID NO: 127684 - DNA, 25 bp, Homo sapien
aaaacaaggtagtcgacatactgga

SEQ ID NO: 127685 - DNA, 25 bp, Homo sapien
aacctctaccccagacagtttagga

SEQ ID NO: 127686 - DNA, 25 bp, Homo sapien
aacctctacccctgacagtttagga

SEQ ID NO: 127687 - DNA, 25 bp, Homo sapien
aggttttaccctgctataatcagta

SEQ ID NO: 127688 - DNA, 25 bp, Homo sapien
aggttttaccctcctataatcagta

SEQ ID NO: 127689 - DNA, 25 bp, Homo sapien
tcatcgatcccgtacacgaaccggt

SEQ ID NO: 127690 - DNA, 25 bp, Homo sapien
tcatcgatcccgaacacgaaccggt

SEQ ID NO: 127691 - DNA, 25 bp, Homo sapien
gaacctctagcgacaaatagatctt

SEQ ID NO: 127692 - DNA, 25 bp, Homo sapien
gaacctctagcgtcaaatagatctt

SEQ ID NO: 127693 - DNA, 25 bp, Homo sapien
tcggggaccagtgtcccttccggct

SEQ ID NO: 127694 - DNA, 25 bp, Homo sapien
tcggggaccagtctcccttccggct

SEQ ID NO: 127695 - DNA, 25 bp, Homo sapien
agagacctaccctgagggtccacgg

SEQ ID NO: 127696 - DNA, 25 bp, Homo sapien
agagacctacccagagggtccacgg

SEQ ID NO: 127697 - DNA, 25 bp, Homo sapien
tagggataccggatacgggtcccct

SEQ ID NO: 127698 - DNA, 25 bp, Homo sapien
tagggataccggttacgggtcccct

SEQ ID NO: 127699 - DNA, 25 bp, Homo sapien
ctcacgtgtctcgagtcgcacgcgt

SEQ ID NO: 127700 - DNA, 25 bp, Homo sapien
ctcacgtgtctccagtcgcacgcgt

SEQ ID NO: 127701 - DNA, 25 bp, Homo sapien
gacttgtagagtacgtcctcttagg

SEQ ID NO: 127702 - DNA, 25 bp, Homo sapien
gacttgtagagttcgtcctcttagg

SEQ ID NO: 127703 - DNA, 25 bp, Homo sapien
aataagacgttttcctaatccttgg

SEQ ID NO: 127704 - DNA, 25 bp, Homo sapien
aataagacgtttacctaatccttgg

SEQ ID NO: 127705 - DNA, 25 bp, Homo sapien
atagacgtcgtcgaccaattttgag

SEQ ID NO: 127706 - DNA, 25 bp, Homo sapien
atagacgtcgtccaccaattttgag

SEQ ID NO: 127707 - DNA, 25 bp, Homo sapien
agagacgagccgtcgattttgtaga

SEQ ID NO: 127708 - DNA, 25 bp, Homo sapien
agagacgagccgacgattttgtaga

SEQ ID NO: 127709 - DNA, 25 bp, Homo sapien
cctaaaagatcgagctttgtgtgta

SEQ ID NO: 127710 - DNA, 25 bp, Homo sapien
cctaaaagatcgtgctttgtgtgta

SEQ ID NO: 127711 - DNA, 25 bp, Homo sapien
gtgacaagcggtacctttcgtccgg

SEQ ID NO: 127712 - DNA, 25 bp, Homo sapien
gtgacaagcggttcctttcgtccgg

SEQ ID NO: 127713 - DNA, 25 bp, Homo sapien
agagagcagtcgtcccggtgcccga

SEQ ID NO: 127714 - DNA, 25 bp, Homo sapien
agagagcagtcgacccggtgcccga

SEQ ID NO: 127715 - DNA, 25 bp, Homo sapien
aaggatctgcacctccgtttgtcgg

SEQ ID NO: 127716 - DNA, 25 bp, Homo sapien
aaggatctgcacgtccgtttgtcgg

SEQ ID NO: 127717 - DNA, 25 bp, Homo sapien
aaggacgatctaacacacgtcgttt

SEQ ID NO: 127718 - DNA, 25 bp, Homo sapien
aaggacgatctatcacacgtcgttt

SEQ ID NO: 127719 - DNA, 25 bp, Homo sapien
tcagcgacgacgaacattgccctct

SEQ ID NO: 127720 - DNA, 25 bp, Homo sapien
tcagcgacgacgtacattgccctct

SEQ ID NO: 127721 - DNA, 25 bp, Homo sapien
tcgacggtaagaacgatggttcacc

SEQ ID NO: 127722 - DNA, 25 bp, Homo sapien
tcgacggtaagatcgatggttcacc

SEQ ID NO: 127723 - DNA, 25 bp, Homo sapien
cgagaagtagaagagtagttctctc

SEQ ID NO: 127724 - DNA, 25 bp, Homo sapien
cgagaagtagaacagtagttctctc

SEQ ID NO: 127725 - DNA, 25 bp, Homo sapien
tacggacatagacatagttatcctc

SEQ ID NO: 127726 - DNA, 25 bp, Homo sapien
tacggacatagagatagttatcctc

SEQ ID NO: 127727 - DNA, 25 bp, Homo sapien
taaacggtacactgtatttagtgcc

SEQ ID NO: 127728 - DNA, 25 bp, Homo sapien
taaacggtacacagtatttagtgcc

SEQ ID NO: 127729 - DNA, 25 bp, Homo sapien
gacctgctagtatctcactagagac

SEQ ID NO: 127730 - DNA, 25 bp, Homo sapien
gacctgctagtaactcactagagac

SEQ ID NO: 127731 - DNA, 25 bp, Homo sapien
tatttacaaagatcgaccactcgga

SEQ ID NO: 127732 - DNA, 25 bp, Homo sapien
tatttacaaagaacgaccactcgga

SEQ ID NO: 127733 - DNA, 25 bp, Homo sapien
gttactaaagtaaagagacctcttc

SEQ ID NO: 127734 - DNA, 25 bp, Homo sapien
gttactaaagtatagagacctcttc

SEQ ID NO: 127735 - DNA, 25 bp, Homo sapien
tgactctagaaggataaccacttca

SEQ ID NO: 127736 - DNA, 25 bp, Homo sapien
tgactctagaagcataaccacttca

SEQ ID NO: 127737 - DNA, 25 bp, Homo sapien
tgacctttgacaggaccctctcggt

SEQ ID NO: 127738 - DNA, 25 bp, Homo sapien
tgacctttgacacgaccctctcggt

SEQ ID NO: 127739 - DNA, 25 bp, Homo sapien
gacgtatggtagcaggcaatttgtc

SEQ ID NO: 127740 - DNA, 25 bp, Homo sapien
gacgtatggtaggaggcaatttgtc

SEQ ID NO: 127741 - DNA, 25 bp, Homo sapien
atgttgggtccttgtgattcgtatc

SEQ ID NO: 127742 - DNA, 25 bp, Homo sapien
atgttgggtcctagtgattcgtatc

SEQ ID NO: 127743 - DNA, 25 bp, Homo sapien
ctttgtcttcgtctcgagtaacttc

SEQ ID NO: 127744 - DNA, 25 bp, Homo sapien
ctttgtcttcgtgtcgagtaacttc

SEQ ID NO: 127745 - DNA, 25 bp, Homo sapien
ggttcacgttgtttgcaaataattc

SEQ ID NO: 127746 - DNA, 25 bp, Homo sapien
ggttcacgttgtatgcaaataattc

SEQ ID NO: 127747 - DNA, 25 bp, Homo sapien
ggttaaactccgtcaaatgtaatac

SEQ ID NO: 127748 - DNA, 25 bp, Homo sapien
ggttaaactccgacaaatgtaatac

SEQ ID NO: 127749 - DNA, 25 bp, Homo sapien
ttgagacatctccagtaaatgtaaa

SEQ ID NO: 127750 - DNA, 25 bp, Homo sapien
ttgagacatctcgagtaaatgtaaa

SEQ ID NO: 127751 - DNA, 25 bp, Homo sapien
ttataagaaggtccagcaaaggaca

SEQ ID NO: 127752 - DNA, 25 bp, Homo sapien
ttataagaaggtgcagcaaaggaca

SEQ ID NO: 127753 - DNA, 25 bp, Homo sapien
gttggtgaaactggttaatatccac

SEQ ID NO: 127754 - DNA, 25 bp, Homo sapien
gttggtgaaactcgttaatatccac

SEQ ID NO: 127755 - DNA, 25 bp, Homo sapien
gtctcggacttcttctataaccaca

SEQ ID NO: 127756 - DNA, 25 bp, Homo sapien
gtctcggacttcatctataaccaca

SEQ ID NO: 127757 - DNA, 25 bp, Homo sapien
taagagcagcacataaacactagag

SEQ ID NO: 127758 - DNA, 25 bp, Homo sapien
taagagcagcacttaaacactagag

SEQ ID NO: 127759 - DNA, 25 bp, Homo sapien
gttatgcccggaacagaacacgaag

SEQ ID NO: 127760 - DNA, 25 bp, Homo sapien
gttatgcccggatcagaacacgaag

SEQ ID NO: 127761 - DNA, 25 bp, Homo sapien
ttgtacctccatgaaacgactactg

SEQ ID NO: 127762 - DNA, 25 bp, Homo sapien
ttgtacctccatcaaacgactactg

SEQ ID NO: 127763 - DNA, 25 bp, Homo sapien
gtgttcatacatagaatacacacgt

SEQ ID NO: 127764 - DNA, 25 bp, Homo sapien
gtgttcatacattgaatacacacgt

SEQ ID NO: 127765 - DNA, 25 bp, Homo sapien
atttgactaaaacagatagtctcgt

SEQ ID NO: 127766 - DNA, 25 bp, Homo sapien
atttgactaaaagagatagtctcgt

SEQ ID NO: 127767 - DNA, 25 bp, Homo sapien
gtatcttttaaacgtcatacagttg

SEQ ID NO: 127768 - DNA, 25 bp, Homo sapien
gtatcttttaaaggtcatacagttg

SEQ ID NO: 127769 - DNA, 25 bp, Homo sapien
ggatctttgtaaagttcttcatgtc

SEQ ID NO: 127770 - DNA, 25 bp, Homo sapien
ggatctttgtaatgttcttcatgtc

SEQ ID NO: 127771 - DNA, 25 bp, Homo sapien
gtttgctgtcggtgactcccgtgtc

SEQ ID NO: 127772 - DNA, 25 bp, Homo sapien
gtttgctgtcggagactcccgtgtc

SEQ ID NO: 127773 - DNA, 25 bp, Homo sapien
ggtgggtagtgggtcccctcgtctc

SEQ ID NO: 127774 - DNA, 25 bp, Homo sapien
ggtgggtagtggctcccctcgtctc

SEQ ID NO: 127775 - DNA, 25 bp, Homo sapien
gggtggtagtcctctctcagtcctg

SEQ ID NO: 127776 - DNA, 25 bp, Homo sapien
gggtggtagtccactctcagtcctg

SEQ ID NO: 127777 - DNA, 25 bp, Homo sapien
cagagagtccctaccgtgagacacc

SEQ ID NO: 127778 - DNA, 25 bp, Homo sapien
cagagagtcccttccgtgagacacc

SEQ ID NO: 127779 - DNA, 25 bp, Homo sapien
tggacggtccatgtacgagaataag

SEQ ID NO: 127780 - DNA, 25 bp, Homo sapien
tggacggtccatctacgagaataag

SEQ ID NO: 127781 - DNA, 25 bp, Homo sapien
tatgacggctttcacttagattccg

SEQ ID NO: 127782 - DNA, 25 bp, Homo sapien
tatgacggctttgacttagattccg

SEQ ID NO: 127783 - DNA, 25 bp, Homo sapien
ctcttcggggtccacggagtaccca

SEQ ID NO: 127784 - DNA, 25 bp, Homo sapien
ctcttcggggtcgacggagtaccca

SEQ ID NO: 127785 - DNA, 25 bp, Homo sapien
atggtcgggtcagactgacgcctca

SEQ ID NO: 127786 - DNA, 25 bp, Homo sapien
atggtcgggtcacactgacgcctca

SEQ ID NO: 127787 - DNA, 25 bp, Homo sapien
gtgttacgaactgagcctgaggccc

SEQ ID NO: 127788 - DNA, 25 bp, Homo sapien
gtgttacgaactcagcctgaggccc

SEQ ID NO: 127789 - DNA, 25 bp, Homo sapien
gtcgagaaccatcatcagccacgac

SEQ ID NO: 127790 - DNA, 25 bp, Homo sapien
gtcgagaaccatgatcagccacgac

SEQ ID NO: 127791 - DNA, 25 bp, Homo sapien
cggtggagagttctgaccacaaagg

SEQ ID NO: 127792 - DNA, 25 bp, Homo sapien
cggtggagagttgtgaccacaaagg

SEQ ID NO: 127793 - DNA, 25 bp, Homo sapien
tttggaaatcgagctaccaggagga

SEQ ID NO: 127794 - DNA, 25 bp, Homo sapien
tttggaaatcgacctaccaggagga

SEQ ID NO: 127795 - DNA, 25 bp, Homo sapien
gtctgtaaaccctgacttggagaga

SEQ ID NO: 127796 - DNA, 25 bp, Homo sapien
gtctgtaaacccagacttggagaga

SEQ ID NO: 127797 - DNA, 25 bp, Homo sapien
tgtacttaaggacaaccggggacga

SEQ ID NO: 127798 - DNA, 25 bp, Homo sapien
tgtacttaaggagaaccggggacga

SEQ ID NO: 127799 - DNA, 25 bp, Homo sapien
taatgtaaatctggacccgaaaact

SEQ ID NO: 127800 - DNA, 25 bp, Homo sapien
taatgtaaatctcgacccgaaaact

SEQ ID NO: 127801 - DNA, 25 bp, Homo sapien
ctgtgacttatactagacaactaag

SEQ ID NO: 127802 - DNA, 25 bp, Homo sapien
ctgtgacttatagtagacaactaag

SEQ ID NO: 127803 - DNA, 25 bp, Homo sapien
tttccggactagacctccgtcttca

SEQ ID NO: 127804 - DNA, 25 bp, Homo sapien
tttccggactagtcctccgtcttca

SEQ ID NO: 127805 - DNA, 25 bp, Homo sapien
tcaagacgtacacgtgcaccatctc

SEQ ID NO: 127806 - DNA, 25 bp, Homo sapien
tcaagacgtacaggtgcaccatctc

SEQ ID NO: 127807 - DNA, 25 bp, Homo sapien
ttgtaaactatatagacccactttc

SEQ ID NO: 127808 - DNA, 25 bp, Homo sapien
ttgtaaactataaagacccactttc

SEQ ID NO: 127809 - DNA, 25 bp, Homo sapien
agagacaccccttaccacagttgcg

SEQ ID NO: 127810 - DNA, 25 bp, Homo sapien
agagacacccctaaccacagttgcg

SEQ ID NO: 127811 - DNA, 25 bp, Homo sapien
agtatacccgtgaacccgagccacg

SEQ ID NO: 127812 - DNA, 25 bp, Homo sapien
agtatacccgtgtacccgagccacg

SEQ ID NO: 127813 - DNA, 25 bp, Homo sapien
taggattcccggtctcttccactac

SEQ ID NO: 127814 - DNA, 25 bp, Homo sapien
taggattcccggactcttccactac

SEQ ID NO: 127815 - DNA, 25 bp, Homo sapien
ggggatttcgttagtctcgggaaac

SEQ ID NO: 127816 - DNA, 25 bp, Homo sapien
ggggatttcgtttgtctcgggaaac

SEQ ID NO: 127817 - DNA, 25 bp, Homo sapien
gaattggtatatgaccggtgatcac

SEQ ID NO: 127818 - DNA, 25 bp, Homo sapien
gaattggtatatcaccggtgatcac

SEQ ID NO: 127819 - DNA, 25 bp, Homo sapien
ggactatcaacgagacgcggaacca

SEQ ID NO: 127820 - DNA, 25 bp, Homo sapien
ggactatcaacgtgacgcggaacca

SEQ ID NO: 127821 - DNA, 25 bp, Homo sapien
ggcgacgcctcgtccaggttgtcct

SEQ ID NO: 127822 - DNA, 25 bp, Homo sapien
ggcgacgcctcgaccaggttgtcct

SEQ ID NO: 127823 - DNA, 25 bp, Homo sapien
cctgaacagttccaaaagtctgtaa

SEQ ID NO: 127824 - DNA, 25 bp, Homo sapien
cctgaacagttcgaaaagtctgtaa

SEQ ID NO: 127825 - DNA, 25 bp, Homo sapien
cttgaagtcaactttatgactgtaa

SEQ ID NO: 127826 - DNA, 25 bp, Homo sapien
cttgaagtcaacattatgactgtaa

SEQ ID NO: 127827 - DNA, 25 bp, Homo sapien
gaaaatatgtagtgtcacaatcacc

SEQ ID NO: 127828 - DNA, 25 bp, Homo sapien
gaaaatatgtagagtcacaatcacc

SEQ ID NO: 127829 - DNA, 25 bp, Homo sapien
ttacaggatggtagttgataccagc

SEQ ID NO: 127830 - DNA, 25 bp, Homo sapien
ttacaggatggttgttgataccagc

SEQ ID NO: 127831 - DNA, 25 bp, Homo sapien
ttaagaagtacagtgtcaattcatc

SEQ ID NO: 127832 - DNA, 25 bp, Homo sapien
ttaagaagtacactgtcaattcatc

SEQ ID NO: 127833 - DNA, 25 bp, Homo sapien
atagggaaatacaaacgcttaatac

SEQ ID NO: 127834 - DNA, 25 bp, Homo sapien
atagggaaatactaacgcttaatac

SEQ ID NO: 127835 - DNA, 25 bp, Homo sapien
tcaggtaacctctaccttacatgtg

SEQ ID NO: 127836 - DNA, 25 bp, Homo sapien
tcaggtaacctcaaccttacatgtg

SEQ ID NO: 127837 - DNA, 25 bp, Homo sapien
gtgtcttcgtacttacgttaaactt

SEQ ID NO: 127838 - DNA, 25 bp, Homo sapien
gtgtcttcgtacatacgttaaactt

SEQ ID NO: 127839 - DNA, 25 bp, Homo sapien
atgacgctaactatcgttataggtt

SEQ ID NO: 127840 - DNA, 25 bp, Homo sapien
atgacgctaactttcgttataggtt

SEQ ID NO: 127841 - DNA, 25 bp, Homo sapien
caaaagtccttctttgataatacgg

SEQ ID NO: 127842 - DNA, 25 bp, Homo sapien
caaaagtccttcattgataatacgg

SEQ ID NO: 127843 - DNA, 25 bp, Homo sapien
ccaccacgtcagtcggagcgagagt

SEQ ID NO: 127844 - DNA, 25 bp, Homo sapien
ccaccacgtcagacggagcgagagt

SEQ ID NO: 127845 - DNA, 25 bp, Homo sapien
tccgtgacatcatagtcagtcaggt

SEQ ID NO: 127846 - DNA, 25 bp, Homo sapien
tccgtgacatcaaagtcagtcaggt

SEQ ID NO: 127847 - DNA, 25 bp, Homo sapien
ttgtgacacgtcgaagtcaaacggt

SEQ ID NO: 127848 - DNA, 25 bp, Homo sapien
ttgtgacacgtccaagtcaaacggt

SEQ ID NO: 127849 - DNA, 25 bp, Homo sapien
acgacgtagtagaggacgagtccga

SEQ ID NO: 127850 - DNA, 25 bp, Homo sapien
acgacgtagtagtggacgagtccga

SEQ ID NO: 127851 - DNA, 25 bp, Homo sapien
gtggaactactctggtaacggcgca

SEQ ID NO: 127852 - DNA, 25 bp, Homo sapien
gtggaactactcaggtaacggcgca

SEQ ID NO: 127853 - DNA, 25 bp, Homo sapien
acgtcggagttcatctgatccttca

SEQ ID NO: 127854 - DNA, 25 bp, Homo sapien
acgtcggagttcttctgatccttca

SEQ ID NO: 127855 - DNA, 25 bp, Homo sapien
caccggctctctaaaatttcgtcct

SEQ ID NO: 127856 - DNA, 25 bp, Homo sapien
caccggctctcttaaatttcgtcct

SEQ ID NO: 127857 - DNA, 25 bp, Homo sapien
caccgacttgtttaattgcttcgta

SEQ ID NO: 127858 - DNA, 25 bp, Homo sapien
caccgacttgttaaattgcttcgta

SEQ ID NO: 127859 - DNA, 25 bp, Homo sapien
ccggaaccgactgaaaccgcttctc

SEQ ID NO: 127860 - DNA, 25 bp, Homo sapien
ccggaaccgactcaaaccgcttctc

SEQ ID NO: 127861 - DNA, 25 bp, Homo sapien
ggaaccgatcagacagtaactcgac

SEQ ID NO: 127862 - DNA, 25 bp, Homo sapien
ggaaccgatcagtcagtaactcgac

SEQ ID NO: 127863 - DNA, 25 bp, Homo sapien
ggtcgtccaacatcagtcgcttcct

SEQ ID NO: 127864 - DNA, 25 bp, Homo sapien
ggtcgtccaacaacagtcgcttcct

SEQ ID NO: 127865 - DNA, 25 bp, Homo sapien
gtcgcccaagagagtcgcggtagtt

SEQ ID NO: 127866 - DNA, 25 bp, Homo sapien
gtcgcccaagagtgtcgcggtagtt

SEQ ID NO: 127867 - DNA, 25 bp, Homo sapien
gttctaccactagaccccgcggttg

SEQ ID NO: 127868 - DNA, 25 bp, Homo sapien
gttctaccactacaccccgcggttg

SEQ ID NO: 127869 - DNA, 25 bp, Homo sapien
cacggagaccttggtgtagtacatg

SEQ ID NO: 127870 - DNA, 25 bp, Homo sapien
cacggagaccttcgtgtagtacatg

SEQ ID NO: 127871 - DNA, 25 bp, Homo sapien
ggcagaggctcctttcggactgtaa

SEQ ID NO: 127872 - DNA, 25 bp, Homo sapien
ggcagaggctccattcggactgtaa

SEQ ID NO: 127873 - DNA, 25 bp, Homo sapien
gagagacggtctcttgtatgtcggc

SEQ ID NO: 127874 - DNA, 25 bp, Homo sapien
gagagacggtctgttgtatgtcggc

SEQ ID NO: 127875 - DNA, 25 bp, Homo sapien
caagagaagttcatgttttagcggc

SEQ ID NO: 127876 - DNA, 25 bp, Homo sapien
caagagaagttcttgttttagcggc

SEQ ID NO: 127877 - DNA, 25 bp, Homo sapien
taagacgagtgacttccttcccacc

SEQ ID NO: 127878 - DNA, 25 bp, Homo sapien
taagacgagtgagttccttcccacc

SEQ ID NO: 127879 - DNA, 25 bp, Homo sapien
ttaggactgaaactcaaccactaag

SEQ ID NO: 127880 - DNA, 25 bp, Homo sapien
ttaggactgaaagtcaaccactaag

SEQ ID NO: 127881 - DNA, 25 bp, Homo sapien
tacgtcactacagacagttctgtaa

SEQ ID NO: 127882 - DNA, 25 bp, Homo sapien
tacgtcactacacacagttctgtaa

SEQ ID NO: 127883 - DNA, 25 bp, Homo sapien
ctacgtcttcaggagtgtgtttata

SEQ ID NO: 127884 - DNA, 25 bp, Homo sapien
ctacgtcttcagcagtgtgtttata

SEQ ID NO: 127885 - DNA, 25 bp, Homo sapien
gtaggaaaagtggtcatttctaata

SEQ ID NO: 127886 - DNA, 25 bp, Homo sapien
gtaggaaaagtgctcatttctaata

SEQ ID NO: 127887 - DNA, 25 bp, Homo sapien
agaatcgacacttggaggttcaaga

SEQ ID NO: 127888 - DNA, 25 bp, Homo sapien
agaatcgacactaggaggttcaaga

SEQ ID NO: 127889 - DNA, 25 bp, Homo sapien
tatctccgtcttggagattcgtgaa

SEQ ID NO: 127890 - DNA, 25 bp, Homo sapien
tatctccgtcttcgagattcgtgaa

SEQ ID NO: 127891 - DNA, 25 bp, Homo sapien
ctcgaccttgggatagtctgtcgct

SEQ ID NO: 127892 - DNA, 25 bp, Homo sapien
ctcgaccttgggttagtctgtcgct

SEQ ID NO: 127893 - DNA, 25 bp, Homo sapien
gttctcggatatcgaagcgagtcgt

SEQ ID NO: 127894 - DNA, 25 bp, Homo sapien
gttctcggatatggaagcgagtcgt

SEQ ID NO: 127895 - DNA, 25 bp, Homo sapien
cgccaaactcgaggaggagctccgt

SEQ ID NO: 127896 - DNA, 25 bp, Homo sapien
cgccaaactcgacgaggagctccgt

SEQ ID NO: 127897 - DNA, 25 bp, Homo sapien
tgagtgcaggtcttgggtcccccgt

SEQ ID NO: 127898 - DNA, 25 bp, Homo sapien
tgagtgcaggtcatgggtcccccgt

SEQ ID NO: 127899 - DNA, 25 bp, Homo sapien
tccagttggcggtcccagtttgcct

SEQ ID NO: 127900 - DNA, 25 bp, Homo sapien
tccagttggcggacccagtttgcct

SEQ ID NO: 127901 - DNA, 25 bp, Homo sapien
accaatctccggacccagatgggac

SEQ ID NO: 127902 - DNA, 25 bp, Homo sapien
accaatctccggtcccagatgggac

SEQ ID NO: 127903 - DNA, 25 bp, Homo sapien
gtgatctcccacttgagacccggga

SEQ ID NO: 127904 - DNA, 25 bp, Homo sapien
gtgatctcccacatgagacccggga

SEQ ID NO: 127905 - DNA, 25 bp, Homo sapien
agaggtccaaccagtgtccccaagc

SEQ ID NO: 127906 - DNA, 25 bp, Homo sapien
agaggtccaacctgtgtccccaagc

SEQ ID NO: 127907 - DNA, 25 bp, Homo sapien
gtactgaacctttactctgacatgg

SEQ ID NO: 127908 - DNA, 25 bp, Homo sapien
gtactgaaccttaactctgacatgg

SEQ ID NO: 127909 - DNA, 25 bp, Homo sapien
tggggtgcacatcgacagctaccgc

SEQ ID NO: 127910 - DNA, 25 bp, Homo sapien
tggggtgcacatggacagctaccgc

SEQ ID NO: 127911 - DNA, 25 bp, Homo sapien
gtggagtaccaggtcgaaagagacc

SEQ ID NO: 127912 - DNA, 25 bp, Homo sapien
gtggagtaccagctcgaaagagacc

SEQ ID NO: 127913 - DNA, 25 bp, Homo sapien
agactgtatgtgaattacacaatca

SEQ ID NO: 127914 - DNA, 25 bp, Homo sapien
agactgtatgtgtattacacaatca

SEQ ID NO: 127915 - DNA, 25 bp, Homo sapien
gtggtgtgacggttacaatacgtca

SEQ ID NO: 127916 - DNA, 25 bp, Homo sapien
gtggtgtgacggatacaatacgtca

SEQ ID NO: 127917 - DNA, 25 bp, Homo sapien
caaggggaacggactcgactgtcag

SEQ ID NO: 127918 - DNA, 25 bp, Homo sapien
caaggggaacggtctcgactgtcag

SEQ ID NO: 127919 - DNA, 25 bp, Homo sapien
cgagatcggtctccacgtcggacgt

SEQ ID NO: 127920 - DNA, 25 bp, Homo sapien
cgagatcggtctgcacgtcggacgt

SEQ ID NO: 127921 - DNA, 25 bp, Homo sapien
tcgtagcgaccgactgtccgaccag

SEQ ID NO: 127922 - DNA, 25 bp, Homo sapien
tcgtagcgaccgtctgtccgaccag

SEQ ID NO: 127923 - DNA, 25 bp, Homo sapien
gttaccgaaccacctctctgaacag

SEQ ID NO: 127924 - DNA, 25 bp, Homo sapien
gttaccgaaccagctctctgaacag

SEQ ID NO: 127925 - DNA, 25 bp, Homo sapien
tctgtgtccggactaatctggggac

SEQ ID NO: 127926 - DNA, 25 bp, Homo sapien
tctgtgtccggagtaatctggggac

SEQ ID NO: 127927 - DNA, 25 bp, Homo sapien
atttttatgtcatcattggtgtaac

SEQ ID NO: 127928 - DNA, 25 bp, Homo sapien
atttttatgtcaacattggtgtaac

SEQ ID NO: 127929 - DNA, 25 bp, Homo sapien
aaacatgttaggtctttgatcgtcc

SEQ ID NO: 127930 - DNA, 25 bp, Homo sapien
aaacatgttaggactttgatcgtcc

SEQ ID NO: 127931 - DNA, 25 bp, Homo sapien
ggtgagtcaggatagggttcagtcc

SEQ ID NO: 127932 - DNA, 25 bp, Homo sapien
ggtgagtcaggaaagggttcagtcc

SEQ ID NO: 127933 - DNA, 25 bp, Homo sapien
gcacagtacattgatggcttcaagg

SEQ ID NO: 127934 - DNA, 25 bp, Homo sapien
gcacagtacattcatggcttcaagg

SEQ ID NO: 127935 - DNA, 25 bp, Homo sapien
cactatccgatttcgtcatagaagg

SEQ ID NO: 127936 - DNA, 25 bp, Homo sapien
cactatccgattacgtcatagaagg

SEQ ID NO: 127937 - DNA, 25 bp, Homo sapien
gacatagagacttttacaatcgagg

SEQ ID NO: 127938 - DNA, 25 bp, Homo sapien
gacatagagactattacaatcgagg

SEQ ID NO: 127939 - DNA, 25 bp, Homo sapien
agatggtacactcctgtcacaaatt

SEQ ID NO: 127940 - DNA, 25 bp, Homo sapien
agatggtacactgctgtcacaaatt

SEQ ID NO: 127941 - DNA, 25 bp, Homo sapien
tagggctatccgtcagcatttaact

SEQ ID NO: 127942 - DNA, 25 bp, Homo sapien
tagggctatccgacagcatttaact

SEQ ID NO: 127943 - DNA, 25 bp, Homo sapien
gaaacgaaagagtattcagtcactg

SEQ ID NO: 127944 - DNA, 25 bp, Homo sapien
gaaacgaaagagaattcagtcactg

SEQ ID NO: 127945 - DNA, 25 bp, Homo sapien
gaaagactaaggacttcatctactt

SEQ ID NO: 127946 - DNA, 25 bp, Homo sapien
gaaagactaaggtcttcatctactt

SEQ ID NO: 127947 - DNA, 25 bp, Homo sapien
gatgagagaaagtcttcagtcctgt

SEQ ID NO: 127948 - DNA, 25 bp, Homo sapien
gatgagagaaagacttcagtcctgt

SEQ ID NO: 127949 - DNA, 25 bp, Homo sapien
agacggagaccctttgtgtgactgt

SEQ ID NO: 127950 - DNA, 25 bp, Homo sapien
agacggagacccattgtgtgactgt

SEQ ID NO: 127951 - DNA, 25 bp, Homo sapien
acaaaccgaaccactattagtatgg

SEQ ID NO: 127952 - DNA, 25 bp, Homo sapien
acaaaccgaacctctattagtatgg

SEQ ID NO: 127953 - DNA, 25 bp, Homo sapien
tgtgaccggaacagagaccttacca

SEQ ID NO: 127954 - DNA, 25 bp, Homo sapien
tgtgaccggaactgagaccttacca

SEQ ID NO: 127955 - DNA, 25 bp, Homo sapien
tctgagtaggaaggaggctcctcag

SEQ ID NO: 127956 - DNA, 25 bp, Homo sapien
tctgagtaggaacgaggctcctcag

SEQ ID NO: 127957 - DNA, 25 bp, Homo sapien
ctgctggtaagactcggtcactcag

SEQ ID NO: 127958 - DNA, 25 bp, Homo sapien
ctgctggtaagagtcggtcactcag

SEQ ID NO: 127959 - DNA, 25 bp, Homo sapien
ggtggttttatatgtcggacatacc

SEQ ID NO: 127960 - DNA, 25 bp, Homo sapien
ggtggttttataagtcggacatacc

SEQ ID NO: 127961 - DNA, 25 bp, Homo sapien
gatttttctatatggagacttctct

SEQ ID NO: 127962 - DNA, 25 bp, Homo sapien
gatttttctataaggagacttctct

SEQ ID NO: 127963 - DNA, 25 bp, Homo sapien
gacttttctcggaaacccaacctgt

SEQ ID NO: 127964 - DNA, 25 bp, Homo sapien
gacttttctcggtaacccaacctgt

SEQ ID NO: 127965 - DNA, 25 bp, Homo sapien
tgactcaatgttacactccaagctg

SEQ ID NO: 127966 - DNA, 25 bp, Homo sapien
tgactcaatgtttcactccaagctg

SEQ ID NO: 127967 - DNA, 25 bp, Homo sapien
gccgaggtttcgactcgaacatcag

SEQ ID NO: 127968 - DNA, 25 bp, Homo sapien
gccgaggtttcgtctcgaacatcag

SEQ ID NO: 127969 - DNA, 25 bp, Homo sapien
tgcacacgggttcgtcaaaagaaga

SEQ ID NO: 127970 - DNA, 25 bp, Homo sapien
tgcacacgggttggtcaaaagaaga

SEQ ID NO: 127971 - DNA, 25 bp, Homo sapien
ccgagttgtggtcgaaagtctaggt

SEQ ID NO: 127972 - DNA, 25 bp, Homo sapien
ccgagttgtggtggaaagtctaggt

SEQ ID NO: 127973 - DNA, 25 bp, Homo sapien
tccttttgtgcgacgtaacatctta

SEQ ID NO: 127974 - DNA, 25 bp, Homo sapien
tccttttgtgcgtcgtaacatctta

SEQ ID NO: 127975 - DNA, 25 bp, Homo sapien
ctttgttgtaggtgacacaccctat

SEQ ID NO: 127976 - DNA, 25 bp, Homo sapien
ctttgttgtaggagacacaccctat

SEQ ID NO: 127977 - DNA, 25 bp, Homo sapien
tctgttgggttgttttataccgtca

SEQ ID NO: 127978 - DNA, 25 bp, Homo sapien
tctgttgggttgatttataccgtca

SEQ ID NO: 127979 - DNA, 25 bp, Homo sapien
atgattaaggatgttcaaacgacac

SEQ ID NO: 127980 - DNA, 25 bp, Homo sapien
atgattaaggatcttcaaacgacac

SEQ ID NO: 127981 - DNA, 25 bp, Homo sapien
tctacagaagtttctcctatgttcg

SEQ ID NO: 127982 - DNA, 25 bp, Homo sapien
tctacagaagttactcctatgttcg

SEQ ID NO: 127983 - DNA, 25 bp, Homo sapien
tcattctttttcatttattacttct

SEQ ID NO: 127984 - DNA, 25 bp, Homo sapien
tcattctttttcttttattacttct

SEQ ID NO: 127985 - DNA, 25 bp, Homo sapien
ttatttcttctctctccgtggtcga

SEQ ID NO: 127986 - DNA, 25 bp, Homo sapien
ttatttcttctcactccgtggtcga

SEQ ID NO: 127987 - DNA, 25 bp, Homo sapien
attcagacctcctcgacggactcga

SEQ ID NO: 127988 - DNA, 25 bp, Homo sapien
attcagacctccacgacggactcga

SEQ ID NO: 127989 - DNA, 25 bp, Homo sapien
gtaacgtccttatcacgaactagat

SEQ ID NO: 127990 - DNA, 25 bp, Homo sapien
gtaacgtccttaacacgaactagat

SEQ ID NO: 127991 - DNA, 25 bp, Homo sapien
actggagaccttagacacgagtctt

SEQ ID NO: 127992 - DNA, 25 bp, Homo sapien
actggagacctttgacacgagtctt

SEQ ID NO: 127993 - DNA, 25 bp, Homo sapien
aaggagtcacactaacgtcggagtt

SEQ ID NO: 127994 - DNA, 25 bp, Homo sapien
aaggagtcacacaaacgtcggagtt

SEQ ID NO: 127995 - DNA, 25 bp, Homo sapien
aagggtgtacggacgatcgagtctt

SEQ ID NO: 127996 - DNA, 25 bp, Homo sapien
aagggtgtacggtcgatcgagtctt

SEQ ID NO: 127997 - DNA, 25 bp, Homo sapien
aagtgtgtcagagtgtcgggtacct

SEQ ID NO: 127998 - DNA, 25 bp, Homo sapien
aagtgtgtcagactgtcgggtacct

SEQ ID NO: 127999 - DNA, 25 bp, Homo sapien
gtctcgtcacgctacgtcgggtcga

SEQ ID NO: 128000 - DNA, 25 bp, Homo sapien
gtctcgtcacgcaacgtcgggtcga

SEQ ID NO: 128001 - DNA, 25 bp, Homo sapien
attttaagtgtgtacaccggggtgc

SEQ ID NO: 128002 - DNA, 25 bp, Homo sapien
attttaagtgtgaacaccggggtgc

SEQ ID NO: 128003 - DNA, 25 bp, Homo sapien
taaaggagtgaattccgtccgtcac

SEQ ID NO: 128004 - DNA, 25 bp, Homo sapien
taaaggagtgaaatccgtccgtcac

SEQ ID NO: 128005 - DNA, 25 bp, Homo sapien
agtccgagtcgacgagccggcactc

SEQ ID NO: 128006 - DNA, 25 bp, Homo sapien
agtccgagtcgaggagccggcactc

SEQ ID NO: 128007 - DNA, 25 bp, Homo sapien
aaaggtccaaaaggtcctctcttag

SEQ ID NO: 128008 - DNA, 25 bp, Homo sapien
aaaggtccaaaacgtcctctcttag

SEQ ID NO: 128009 - DNA, 25 bp, Homo sapien
gtaccacccatagatagactttacg

SEQ ID NO: 128010 - DNA, 25 bp, Homo sapien
gtaccacccatacatagactttacg

SEQ ID NO: 128011 - DNA, 25 bp, Homo sapien
catacacgtctcatggagttcttta

SEQ ID NO: 128012 - DNA, 25 bp, Homo sapien
catacacgtctcttggagttcttta

SEQ ID NO: 128013 - DNA, 25 bp, Homo sapien
gaacatctctgactgaagtattact

SEQ ID NO: 128014 - DNA, 25 bp, Homo sapien
gaacatctctgagtgaagtattact

SEQ ID NO: 128015 - DNA, 25 bp, Homo sapien
gaaacgtaagaattacctctatagt

SEQ ID NO: 128016 - DNA, 25 bp, Homo sapien
gaaacgtaagaaatacctctatagt

SEQ ID NO: 128017 - DNA, 25 bp, Homo sapien
tgatcaaatgttaacatcgactatg

SEQ ID NO: 128018 - DNA, 25 bp, Homo sapien
tgatcaaatgtttacatcgactatg

SEQ ID NO: 128019 - DNA, 25 bp, Homo sapien
ggacttcaagaaggaggaccgctca

SEQ ID NO: 128020 - DNA, 25 bp, Homo sapien
ggacttcaagaacgaggaccgctca

SEQ ID NO: 128021 - DNA, 25 bp, Homo sapien
atatcagacgtcattatcgatcgat

SEQ ID NO: 128022 - DNA, 25 bp, Homo sapien
atatcagacgtctttatcgatcgat

SEQ ID NO: 128023 - DNA, 25 bp, Homo sapien
ctaacgagttcgatgtctgatgagt

SEQ ID NO: 128024 - DNA, 25 bp, Homo sapien
ctaacgagttcgttgtctgatgagt

SEQ ID NO: 128025 - DNA, 25 bp, Homo sapien
aaaatttactgtactctttgatgat

SEQ ID NO: 128026 - DNA, 25 bp, Homo sapien
aaaatttactgttctctttgatgat

SEQ ID NO: 128027 - DNA, 25 bp, Homo sapien
agtaagactattgtgcccgtttttt

SEQ ID NO: 128028 - DNA, 25 bp, Homo sapien
agtaagactattctgcccgtttttt

SEQ ID NO: 128029 - DNA, 25 bp, Homo sapien
tgtgactgccacgatttgtatttat

SEQ ID NO: 128030 - DNA, 25 bp, Homo sapien
tgtgactgccaccatttgtatttat

SEQ ID NO: 128031 - DNA, 25 bp, Homo sapien
gaagaacacaactctgtaagactta

SEQ ID NO: 128032 - DNA, 25 bp, Homo sapien
gaagaacacaacactgtaagactta

SEQ ID NO: 128033 - DNA, 25 bp, Homo sapien
aaaagaagcctcgacggaagaaacg

SEQ ID NO: 128034 - DNA, 25 bp, Homo sapien
aaaagaagcctccacggaagaaacg

SEQ ID NO: 128035 - DNA, 25 bp, Homo sapien
aaagagaggtcatccgccagagacc

SEQ ID NO: 128036 - DNA, 25 bp, Homo sapien
aaagagaggtcaaccgccagagacc

SEQ ID NO: 128037 - DNA, 25 bp, Homo sapien
gatcaggagcggtccccggtgaact

SEQ ID NO: 128038 - DNA, 25 bp, Homo sapien
gatcaggagcggaccccggtgaact

SEQ ID NO: 128039 - DNA, 25 bp, Homo sapien
ggctcagggcggaccacccgtaaac

SEQ ID NO: 128040 - DNA, 25 bp, Homo sapien
ggctcagggcggtccacccgtaaac

SEQ ID NO: 128041 - DNA, 25 bp, Homo sapien
ggattcaggggcttccttctcggta

SEQ ID NO: 128042 - DNA, 25 bp, Homo sapien
ggattcaggggcatccttctcggta

SEQ ID NO: 128043 - DNA, 25 bp, Homo sapien
aaacacggaccacgttccaccagag

SEQ ID NO: 128044 - DNA, 25 bp, Homo sapien
aaacacggaccaggttccaccagag

SEQ ID NO: 128045 - DNA, 25 bp, Homo sapien
gactcctcggtgttaccccgtctgt

SEQ ID NO: 128046 - DNA, 25 bp, Homo sapien
gactcctcggtgataccccgtctgt

SEQ ID NO: 128047 - DNA, 25 bp, Homo sapien
gagggttctttctaccaccgtagtc

SEQ ID NO: 128048 - DNA, 25 bp, Homo sapien
gagggttctttcaaccaccgtagtc

SEQ ID NO: 128049 - DNA, 25 bp, Homo sapien
acccctgacgcttaaaaccggttct

SEQ ID NO: 128050 - DNA, 25 bp, Homo sapien
acccctgacgctaaaaaccggttct

SEQ ID NO: 128051 - DNA, 25 bp, Homo sapien
tcccctgggtagacagtcccgtcga

SEQ ID NO: 128052 - DNA, 25 bp, Homo sapien
tcccctgggtagtcagtcccgtcga

SEQ ID NO: 128053 - DNA, 25 bp, Homo sapien
gaccttaaggtggagtgtcttggac

SEQ ID NO: 128054 - DNA, 25 bp, Homo sapien
gaccttaaggtgcagtgtcttggac

SEQ ID NO: 128055 - DNA, 25 bp, Homo sapien
gacctaaaggcaggtatcacaggtt

SEQ ID NO: 128056 - DNA, 25 bp, Homo sapien
gacctaaaggcacgtatcacaggtt

SEQ ID NO: 128057 - DNA, 25 bp, Homo sapien
gtcgtgtttgtatcccaaagagagg

SEQ ID NO: 128058 - DNA, 25 bp, Homo sapien
gtcgtgtttgtaacccaaagagagg

SEQ ID NO: 128059 - DNA, 25 bp, Homo sapien
tccttaattacatccgtaaggacga

SEQ ID NO: 128060 - DNA, 25 bp, Homo sapien
tccttaattacaaccgtaaggacga

SEQ ID NO: 128061 - DNA, 25 bp, Homo sapien
ttatcgtaaccaaacgacaagggac

SEQ ID NO: 128062 - DNA, 25 bp, Homo sapien
ttatcgtaaccatacgacaagggac

SEQ ID NO: 128063 - DNA, 25 bp, Homo sapien
gggtacctcggctcaccacagggac

SEQ ID NO: 128064 - DNA, 25 bp, Homo sapien
gggtacctcggcacaccacagggac

SEQ ID NO: 128065 - DNA, 25 bp, Homo sapien
gacgtccaccgctccaaggagctat

SEQ ID NO: 128066 - DNA, 25 bp, Homo sapien
gacgtccaccgcaccaaggagctat

SEQ ID NO: 128067 - DNA, 25 bp, Homo sapien
tagagccacggatcacataacagcc

SEQ ID NO: 128068 - DNA, 25 bp, Homo sapien
tagagccacggaacacataacagcc

SEQ ID NO: 128069 - DNA, 25 bp, Homo sapien
agtcaaggtcgaccagaacacgctc

SEQ ID NO: 128070 - DNA, 25 bp, Homo sapien
agtcaaggtcgagcagaacacgctc

SEQ ID NO: 128071 - DNA, 25 bp, Homo sapien
cagcattctattggtaagcacccac

SEQ ID NO: 128072 - DNA, 25 bp, Homo sapien
cagcattctattcgtaagcacccac

SEQ ID NO: 128073 - DNA, 25 bp, Homo sapien
aagacatgttcctgggagccacctc

SEQ ID NO: 128074 - DNA, 25 bp, Homo sapien
aagacatgttccagggagccacctc

SEQ ID NO: 128075 - DNA, 25 bp, Homo sapien
aatgttgactacagtggtcggaaca

SEQ ID NO: 128076 - DNA, 25 bp, Homo sapien
aatgttgactactgtggtcggaaca

SEQ ID NO: 128077 - DNA, 25 bp, Homo sapien
ggaacttgaccctcctgtacaactc

SEQ ID NO: 128078 - DNA, 25 bp, Homo sapien
ggaacttgacccacctgtacaactc

SEQ ID NO: 128079 - DNA, 25 bp, Homo sapien
gtaggatgttgacacacttcacccc

SEQ ID NO: 128080 - DNA, 25 bp, Homo sapien
gtaggatgttgagacacttcacccc

SEQ ID NO: 128081 - DNA, 25 bp, Homo sapien
aattcgtggaggacatacgccgtgg

SEQ ID NO: 128082 - DNA, 25 bp, Homo sapien
aattcgtggaggtcatacgccgtgg

SEQ ID NO: 128083 - DNA, 25 bp, Homo sapien
catgtgtgtgggtatgtacccatgt

SEQ ID NO: 128084 - DNA, 25 bp, Homo sapien
catgtgtgtgggaatgtacccatgt

SEQ ID NO: 128085 - DNA, 25 bp, Homo sapien
gggtctgtgggacgattccccatgt

SEQ ID NO: 128086 - DNA, 25 bp, Homo sapien
gggtctgtgggaggattccccatgt

SEQ ID NO: 128087 - DNA, 25 bp, Homo sapien
attgttgtgtgctctgtgccggtac

SEQ ID NO: 128088 - DNA, 25 bp, Homo sapien
attgttgtgtgcactgtgccggtac

SEQ ID NO: 128089 - DNA, 25 bp, Homo sapien
catccgtgtgcgactcggtcagtca

SEQ ID NO: 128090 - DNA, 25 bp, Homo sapien
catccgtgtgcgtctcggtcagtca

SEQ ID NO: 128091 - DNA, 25 bp, Homo sapien
acccggagtacagtgtgctccgtca

SEQ ID NO: 128092 - DNA, 25 bp, Homo sapien
acccggagtacactgtgctccgtca

SEQ ID NO: 128093 - DNA, 25 bp, Homo sapien
ccgtcgagagacaccggtccagttc

SEQ ID NO: 128094 - DNA, 25 bp, Homo sapien
ccgtcgagagactccggtccagttc

SEQ ID NO: 128095 - DNA, 25 bp, Homo sapien
cgtctcgaaaatagggtacgtttcc

SEQ ID NO: 128096 - DNA, 25 bp, Homo sapien
cgtctcgaaaattgggtacgtttcc

SEQ ID NO: 128097 - DNA, 25 bp, Homo sapien
tttcgaaatgacaggtcagtttgct

SEQ ID NO: 128098 - DNA, 25 bp, Homo sapien
tttcgaaatgactggtcagtttgct

SEQ ID NO: 128099 - DNA, 25 bp, Homo sapien
cgtttccaggagtccgtgactaagt

SEQ ID NO: 128100 - DNA, 25 bp, Homo sapien
cgtttccaggagaccgtgactaagt

SEQ ID NO: 128101 - DNA, 25 bp, Homo sapien
cccagtttcggtaccacccgtaaag

SEQ ID NO: 128102 - DNA, 25 bp, Homo sapien
cccagtttcggttccacccgtaaag

SEQ ID NO: 128103 - DNA, 25 bp, Homo sapien
ccgcgaggtgtctccccggaaggac

SEQ ID NO: 128104 - DNA, 25 bp, Homo sapien
ccgcgaggtgtcaccccggaaggac

SEQ ID NO: 128105 - DNA, 25 bp, Homo sapien
gtcacagtctagaccctcaaaggac

SEQ ID NO: 128106 - DNA, 25 bp, Homo sapien
gtcacagtctagtccctcaaaggac

SEQ ID NO: 128107 - DNA, 25 bp, Homo sapien
gcatgactaggttcccgataaatct

SEQ ID NO: 128108 - DNA, 25 bp, Homo sapien
gcatgactaggtacccgataaatct

SEQ ID NO: 128109 - DNA, 25 bp, Homo sapien
ggattctgtgtctccgatagatatg

SEQ ID NO: 128110 - DNA, 25 bp, Homo sapien
ggattctgtgtcaccgatagatatg

SEQ ID NO: 128111 - DNA, 25 bp, Homo sapien
cgccggttactccagagcgtgccat

SEQ ID NO: 128112 - DNA, 25 bp, Homo sapien
cgccggttactcgagagcgtgccat

SEQ ID NO: 128113 - DNA, 25 bp, Homo sapien
ccaggttagtcgtagacgggtgcac

SEQ ID NO: 128114 - DNA, 25 bp, Homo sapien
ccaggttagtcgaagacgggtgcac

SEQ ID NO: 128115 - DNA, 25 bp, Homo sapien
ctgcaagagacactaccgacaggaa

SEQ ID NO: 128116 - DNA, 25 bp, Homo sapien
ctgcaagagacagtaccgacaggaa

SEQ ID NO: 128117 - DNA, 25 bp, Homo sapien
cccagacaccacgtgacggagataa

SEQ ID NO: 128118 - DNA, 25 bp, Homo sapien
cccagacaccacctgacggagataa

SEQ ID NO: 128119 - DNA, 25 bp, Homo sapien
acgccgacgcgaacgcgaagaacgg

SEQ ID NO: 128120 - DNA, 25 bp, Homo sapien
acgccgacgcgatcgcgaagaacgg

SEQ ID NO: 128121 - DNA, 25 bp, Homo sapien
ctcgtaccggtggtcaacggaggtc

SEQ ID NO: 128122 - DNA, 25 bp, Homo sapien
ctcgtaccggtgctcaacggaggtc

SEQ ID NO: 128123 - DNA, 25 bp, Homo sapien
tacgacaatctttaacgactgaccg

SEQ ID NO: 128124 - DNA, 25 bp, Homo sapien
tacgacaatcttaaacgactgaccg

SEQ ID NO: 128125 - DNA, 25 bp, Homo sapien
acatcacatcctaacatacagggtg

SEQ ID NO: 128126 - DNA, 25 bp, Homo sapien
acatcacatccttacatacagggtg

SEQ ID NO: 128127 - DNA, 25 bp, Homo sapien
aagtgcgtcctcaaccacttccggt

SEQ ID NO: 128128 - DNA, 25 bp, Homo sapien
aagtgcgtcctctaccacttccggt

SEQ ID NO: 128129 - DNA, 25 bp, Homo sapien
acgtggcgctcgaccacgtagggct

SEQ ID NO: 128130 - DNA, 25 bp, Homo sapien
acgtggcgctcgtccacgtagggct

SEQ ID NO: 128131 - DNA, 25 bp, Homo sapien
aacgtcctcctcttccagaaggtct

SEQ ID NO: 128132 - DNA, 25 bp, Homo sapien
aacgtcctcctcatccagaaggtct

SEQ ID NO: 128133 - DNA, 25 bp, Homo sapien
gcgcgtgctccagactcactggacg

SEQ ID NO: 128134 - DNA, 25 bp, Homo sapien
gcgcgtgctccacactcactggacg

SEQ ID NO: 128135 - DNA, 25 bp, Homo sapien
gtccgtccgtccggcttccggaggt

SEQ ID NO: 128136 - DNA, 25 bp, Homo sapien
gtccgtccgtcccgcttccggaggt

SEQ ID NO: 128137 - DNA, 25 bp, Homo sapien
gtggaccaccggttgtaggacgaat

SEQ ID NO: 128138 - DNA, 25 bp, Homo sapien
gtggaccaccggatgtaggacgaat

SEQ ID NO: 128139 - DNA, 25 bp, Homo sapien
acggtctcctctgactgtaaactta

SEQ ID NO: 128140 - DNA, 25 bp, Homo sapien
acggtctcctctcactgtaaactta

SEQ ID NO: 128141 - DNA, 25 bp, Homo sapien
ctcggtccctcgagactgaccttag

SEQ ID NO: 128142 - DNA, 25 bp, Homo sapien
ctcggtccctcgtgactgaccttag

SEQ ID NO: 128143 - DNA, 25 bp, Homo sapien
tgacacacccgtttacacgtctctg

SEQ ID NO: 128144 - DNA, 25 bp, Homo sapien
tgacacacccgtatacacgtctctg

SEQ ID NO: 128145 - DNA, 25 bp, Homo sapien
cgaaggtccacagtataaccttctt

SEQ ID NO: 128146 - DNA, 25 bp, Homo sapien
cgaaggtccacactataaccttctt

SEQ ID NO: 128147 - DNA, 25 bp, Homo sapien
tgttcccactactagtcgtagttcc

SEQ ID NO: 128148 - DNA, 25 bp, Homo sapien
tgttcccactacaagtcgtagttcc

SEQ ID NO: 128149 - DNA, 25 bp, Homo sapien
cctcgtcgtcgagaagaacgtcctc

SEQ ID NO: 128150 - DNA, 25 bp, Homo sapien
cctcgtcgtcgacaagaacgtcctc

SEQ ID NO: 128151 - DNA, 25 bp, Homo sapien
gacgtctttctcagggaaggttccg

SEQ ID NO: 128152 - DNA, 25 bp, Homo sapien
gacgtctttctctgggaaggttccg

SEQ ID NO: 128153 - DNA, 25 bp, Homo sapien
ccagttgtagggacggcgtctcacg

SEQ ID NO: 128154 - DNA, 25 bp, Homo sapien
ccagttgtagggtcggcgtctcacg

SEQ ID NO: 128155 - DNA, 25 bp, Homo sapien
cttttatagggtaagatactctcgg

SEQ ID NO: 128156 - DNA, 25 bp, Homo sapien
cttttatagggttagatactctcgg

SEQ ID NO: 128157 - DNA, 25 bp, Homo sapien
tgtcgtgactgatgctgacacctca

SEQ ID NO: 128158 - DNA, 25 bp, Homo sapien
tgtcgtgactgaagctgacacctca

SEQ ID NO: 128159 - DNA, 25 bp, Homo sapien
ttatgaatttttgtgtgttaccgcc

SEQ ID NO: 128160 - DNA, 25 bp, Homo sapien
ttatgaatttttctgtgttaccgcc

SEQ ID NO: 128161 - DNA, 25 bp, Homo sapien
gtgtataaagtctttcatggggccc

SEQ ID NO: 128162 - DNA, 25 bp, Homo sapien
gtgtataaagtcattcatggggccc

SEQ ID NO: 128163 - DNA, 25 bp, Homo sapien
tagaagatccttagtggggtctgtc

SEQ ID NO: 128164 - DNA, 25 bp, Homo sapien
tagaagatcctttgtggggtctgtc

SEQ ID NO: 128165 - DNA, 25 bp, Homo sapien
tttatgtcggtagtagagtactctc

SEQ ID NO: 128166 - DNA, 25 bp, Homo sapien
tttatgtcggtactagagtactctc

SEQ ID NO: 128167 - DNA, 25 bp, Homo sapien
gtcttctcttacgtagagtacttgt

SEQ ID NO: 128168 - DNA, 25 bp, Homo sapien
gtcttctcttacctagagtacttgt

SEQ ID NO: 128169 - DNA, 25 bp, Homo sapien
ggtcctctgagtctacgagtctgtg

SEQ ID NO: 128170 - DNA, 25 bp, Homo sapien
ggtcctctgagtgtacgagtctgtg

SEQ ID NO: 128171 - DNA, 25 bp, Homo sapien
gagacacaccgtagtgtcaggtgtg

SEQ ID NO: 128172 - DNA, 25 bp, Homo sapien
gagacacaccgttgtgtcaggtgtg

SEQ ID NO: 128173 - DNA, 25 bp, Homo sapien
cgaaagaaacattcgtaccaagtac

SEQ ID NO: 128174 - DNA, 25 bp, Homo sapien
cgaaagaaacatacgtaccaagtac

SEQ ID NO: 128175 - DNA, 25 bp, Homo sapien
gtcccgggactagactccgaccaaa

SEQ ID NO: 128176 - DNA, 25 bp, Homo sapien
gtcccgggactacactccgaccaaa

SEQ ID NO: 128177 - DNA, 25 bp, Homo sapien
tggttggacgtttcctaatcttaaa

SEQ ID NO: 128178 - DNA, 25 bp, Homo sapien
tggttggacgttacctaatcttaaa

SEQ ID NO: 128179 - DNA, 25 bp, Homo sapien
ggggaagaggaccttattctccgaa

SEQ ID NO: 128180 - DNA, 25 bp, Homo sapien
ggggaagaggacgttattctccgaa

SEQ ID NO: 128181 - DNA, 25 bp, Homo sapien
ggaaaagagcaaaattctcacatag

SEQ ID NO: 128182 - DNA, 25 bp, Homo sapien
ggaaaagagcaatattctcacatag

SEQ ID NO: 128183 - DNA, 25 bp, Homo sapien
tgataatagagttaaaatttccttt

SEQ ID NO: 128184 - DNA, 25 bp, Homo sapien
tgataatagagtaaaaatttccttt

SEQ ID NO: 128185 - DNA, 25 bp, Homo sapien
acaatacgtacactcgccaattggt

SEQ ID NO: 128186 - DNA, 25 bp, Homo sapien
acaatacgtacagtcgccaattggt

SEQ ID NO: 128187 - DNA, 25 bp, Homo sapien
gaggctacacatcactccatactgg

SEQ ID NO: 128188 - DNA, 25 bp, Homo sapien
gaggctacacatgactccatactgg

SEQ ID NO: 128189 - DNA, 25 bp, Homo sapien
gagtgtgtccttcacaatatcacac

SEQ ID NO: 128190 - DNA, 25 bp, Homo sapien
gagtgtgtccttgacaatatcacac

SEQ ID NO: 128191 - DNA, 25 bp, Homo sapien
agtattaagtactagaagtaccacc

SEQ ID NO: 128192 - DNA, 25 bp, Homo sapien
agtattaagtacaagaagtaccacc

SEQ ID NO: 128193 - DNA, 25 bp, Homo sapien
gaacatatttttggacagctcagac

SEQ ID NO: 128194 - DNA, 25 bp, Homo sapien
gaacatatttttcgacagctcagac

SEQ ID NO: 128195 - DNA, 25 bp, Homo sapien
tagaatgtttttctcagacagagac

SEQ ID NO: 128196 - DNA, 25 bp, Homo sapien
tagaatgtttttgtcagacagagac

SEQ ID NO: 128197 - DNA, 25 bp, Homo sapien
taacatgtgaatcgtatgaaccgga

SEQ ID NO: 128198 - DNA, 25 bp, Homo sapien
taacatgtgaatggtatgaaccgga

SEQ ID NO: 128199 - DNA, 25 bp, Homo sapien
tgtctggtcctctatgacaacgaga

SEQ ID NO: 128200 - DNA, 25 bp, Homo sapien
tgtctggtcctcaatgacaacgaga

SEQ ID NO: 128201 - DNA, 25 bp, Homo sapien
ttcctccgcgaactacagtccgagt

SEQ ID NO: 128202 - DNA, 25 bp, Homo sapien
ttcctccgcgaagtacagtccgagt

SEQ ID NO: 128203 - DNA, 25 bp, Homo sapien
aactctgttcgagatctgtcatcgt

SEQ ID NO: 128204 - DNA, 25 bp, Homo sapien
aactctgttcgacatctgtcatcgt

SEQ ID NO: 128205 - DNA, 25 bp, Homo sapien
cgtccctctgtccatttgtctgtct

SEQ ID NO: 128206 - DNA, 25 bp, Homo sapien
cgtccctctgtcgatttgtctgtct

SEQ ID NO: 128207 - DNA, 25 bp, Homo sapien
tcccactggtcgtgtaaacgtgtac

SEQ ID NO: 128208 - DNA, 25 bp, Homo sapien
tcccactggtcgagtaaacgtgtac

SEQ ID NO: 128209 - DNA, 25 bp, Homo sapien
gacccagactctagggtgtaacgga

SEQ ID NO: 128210 - DNA, 25 bp, Homo sapien
gacccagactcttgggtgtaacgga

SEQ ID NO: 128211 - DNA, 25 bp, Homo sapien
cccaacactagtcgaggttgactcc

SEQ ID NO: 128212 - DNA, 25 bp, Homo sapien
cccaacactagtggaggttgactcc

SEQ ID NO: 128213 - DNA, 25 bp, Homo sapien
acgcgtgtagtttcgacggtgtccc

SEQ ID NO: 128214 - DNA, 25 bp, Homo sapien
acgcgtgtagttacgacggtgtccc

SEQ ID NO: 128215 - DNA, 25 bp, Homo sapien
tacggtacatgttacatcattgtcg

SEQ ID NO: 128216 - DNA, 25 bp, Homo sapien
tacggtacatgtaacatcattgtcg

SEQ ID NO: 128217 - DNA, 25 bp, Homo sapien
agattatctcacagggcctccggtc

SEQ ID NO: 128218 - DNA, 25 bp, Homo sapien
agattatctcactgggcctccggtc

SEQ ID NO: 128219 - DNA, 25 bp, Homo sapien
ctggatacaatttcgcttccagtcg

SEQ ID NO: 128220 - DNA, 25 bp, Homo sapien
ctggatacaattacgcttccagtcg

SEQ ID NO: 128221 - DNA, 25 bp, Homo sapien
ggagtactcctttggtactaggctc

SEQ ID NO: 128222 - DNA, 25 bp, Homo sapien
ggagtactccttaggtactaggctc

SEQ ID NO: 128223 - DNA, 25 bp, Homo sapien
tactgtctgagtgaggtctcgatta

SEQ ID NO: 128224 - DNA, 25 bp, Homo sapien
tactgtctgagtcaggtctcgatta

SEQ ID NO: 128225 - DNA, 25 bp, Homo sapien
tttttgtctgtttagtcaacagtca

SEQ ID NO: 128226 - DNA, 25 bp, Homo sapien
tttttgtctgttaagtcaacagtca

SEQ ID NO: 128227 - DNA, 25 bp, Homo sapien
cattaggttcttgaagtcctgataa

SEQ ID NO: 128228 - DNA, 25 bp, Homo sapien
cattaggttcttcaagtcctgataa

SEQ ID NO: 128229 - DNA, 25 bp, Homo sapien
acaaggcctccaaccgctatattag

SEQ ID NO: 128230 - DNA, 25 bp, Homo sapien
acaaggcctccatccgctatattag

SEQ ID NO: 128231 - DNA, 25 bp, Homo sapien
gagacgacctgaatcatattacact

SEQ ID NO: 128232 - DNA, 25 bp, Homo sapien
gagacgacctgattcatattacact

SEQ ID NO: 128233 - DNA, 25 bp, Homo sapien
gtagaccagtgaacctaccctctct

SEQ ID NO: 128234 - DNA, 25 bp, Homo sapien
gtagaccagtgatcctaccctctct

SEQ ID NO: 128235 - DNA, 25 bp, Homo sapien
gtacatgttctgtctgcacctccac

SEQ ID NO: 128236 - DNA, 25 bp, Homo sapien
gtacatgttctgactgcacctccac

SEQ ID NO: 128237 - DNA, 25 bp, Homo sapien
tatggtactctgtgtgtcaagacca

SEQ ID NO: 128238 - DNA, 25 bp, Homo sapien
tatggtactctgagtgtcaagacca

SEQ ID NO: 128239 - DNA, 25 bp, Homo sapien
ccatggattcgttcagtcaacccat

SEQ ID NO: 128240 - DNA, 25 bp, Homo sapien
ccatggattcgtacagtcaacccat

SEQ ID NO: 128241 - DNA, 25 bp, Homo sapien
cacccaaccaacgaagtactacagg

SEQ ID NO: 128242 - DNA, 25 bp, Homo sapien
cacccaaccaaccaagtactacagg

SEQ ID NO: 128243 - DNA, 25 bp, Homo sapien
cacgaacactaaacctcagacagtg

SEQ ID NO: 128244 - DNA, 25 bp, Homo sapien
cacgaacactaatcctcagacagtg

SEQ ID NO: 128245 - DNA, 25 bp, Homo sapien
gaaagaatacatacaccagagggac

SEQ ID NO: 128246 - DNA, 25 bp, Homo sapien
gaaagaatacattcaccagagggac

SEQ ID NO: 128247 - DNA, 25 bp, Homo sapien
gataaggtaaaggtgtaccaagaaa

SEQ ID NO: 128248 - DNA, 25 bp, Homo sapien
gataaggtaaagctgtaccaagaaa

SEQ ID NO: 128249 - DNA, 25 bp, Homo sapien
gggattgtgtttaggtccctgaaac

SEQ ID NO: 128250 - DNA, 25 bp, Homo sapien
gggattgtgttttggtccctgaaac

SEQ ID NO: 128251 - DNA, 25 bp, Homo sapien
agtgtcctttttatacctgtgaaca

SEQ ID NO: 128252 - DNA, 25 bp, Homo sapien
agtgtcctttttttacctgtgaaca

SEQ ID NO: 128253 - DNA, 25 bp, Homo sapien
tctctttcaggtatcactacggaaa

SEQ ID NO: 128254 - DNA, 25 bp, Homo sapien
tctctttcaggtttcactacggaaa

SEQ ID NO: 128255 - DNA, 25 bp, Homo sapien
agttttcacagttccaccgaagacc

SEQ ID NO: 128256 - DNA, 25 bp, Homo sapien
agttttcacagtaccaccgaagacc

SEQ ID NO: 128257 - DNA, 25 bp, Homo sapien
agtctttaaattggttctacgaatc

SEQ ID NO: 128258 - DNA, 25 bp, Homo sapien
agtctttaaattcgttctacgaatc

SEQ ID NO: 128259 - DNA, 25 bp, Homo sapien
tctcctaaactttatactctgaaga

SEQ ID NO: 128260 - DNA, 25 bp, Homo sapien
tctcctaaacttaatactctgaaga

SEQ ID NO: 128261 - DNA, 25 bp, Homo sapien
tcatcctaaacctaccctcgaagag

SEQ ID NO: 128262 - DNA, 25 bp, Homo sapien
tcatcctaaaccaaccctcgaagag

SEQ ID NO: 128263 - DNA, 25 bp, Homo sapien
attgtccatgttttacaccggaaag

SEQ ID NO: 128264 - DNA, 25 bp, Homo sapien
attgtccatgttatacaccggaaag

SEQ ID NO: 128265 - DNA, 25 bp, Homo sapien
ttccgaatagtctcccttaggtcgg

SEQ ID NO: 128266 - DNA, 25 bp, Homo sapien
ttccgaatagtcacccttaggtcgg

SEQ ID NO: 128267 - DNA, 25 bp, Homo sapien
ttgtccgttacctgcgatggggtct

SEQ ID NO: 128268 - DNA, 25 bp, Homo sapien
ttgtccgttaccagcgatggggtct

SEQ ID NO: 128269 - DNA, 25 bp, Homo sapien
gtcgattcgtttgtctaggaaacat

SEQ ID NO: 128270 - DNA, 25 bp, Homo sapien
gtcgattcgtttctctaggaaacat

SEQ ID NO: 128271 - DNA, 25 bp, Homo sapien
agttgttgtcagttacgtcattcac

SEQ ID NO: 128272 - DNA, 25 bp, Homo sapien
agttgttgtcagatacgtcattcac

SEQ ID NO: 128273 - DNA, 25 bp, Homo sapien
tacgtgttgtcattcgtatcttgat

SEQ ID NO: 128274 - DNA, 25 bp, Homo sapien
tacgtgttgtcaatcgtatcttgat

SEQ ID NO: 128275 - DNA, 25 bp, Homo sapien
gatacgttctcgtctcagttgaagt

SEQ ID NO: 128276 - DNA, 25 bp, Homo sapien
gatacgttctcgactcagttgaagt

SEQ ID NO: 128277 - DNA, 25 bp, Homo sapien
aaagcatctacctattgactccgag

SEQ ID NO: 128278 - DNA, 25 bp, Homo sapien
aaagcatctaccaattgactccgag

SEQ ID NO: 128279 - DNA, 25 bp, Homo sapien
gtttgtatcctcttattaaaccgtg

SEQ ID NO: 128280 - DNA, 25 bp, Homo sapien
gtttgtatcctcatattaaaccgtg

SEQ ID NO: 128281 - DNA, 25 bp, Homo sapien
tgttttcctccttacgtacagttgt

SEQ ID NO: 128282 - DNA, 25 bp, Homo sapien
tgttttcctcctaacgtacagttgt

SEQ ID NO: 128283 - DNA, 25 bp, Homo sapien
tgtacgagtcggtacgcacgtgtgt

SEQ ID NO: 128284 - DNA, 25 bp, Homo sapien
tgtacgagtcggaacgcacgtgtgt

SEQ ID NO: 128285 - DNA, 25 bp, Homo sapien
accggtgtcgaaggaacctgtatct

SEQ ID NO: 128286 - DNA, 25 bp, Homo sapien
accggtgtcgaacgaacctgtatct

SEQ ID NO: 128287 - DNA, 25 bp, Homo sapien
tacacggtctgtaagtgactttttt

SEQ ID NO: 128288 - DNA, 25 bp, Homo sapien
tacacggtctgttagtgactttttt

SEQ ID NO: 128289 - DNA, 25 bp, Homo sapien
gtgaccatgttttacgtattcatgt

SEQ ID NO: 128290 - DNA, 25 bp, Homo sapien
gtgaccatgtttaacgtattcatgt

SEQ ID NO: 128291 - DNA, 25 bp, Homo sapien
gtcacactggtggagtcgactcatt

SEQ ID NO: 128292 - DNA, 25 bp, Homo sapien
gtcacactggtgcagtcgactcatt

SEQ ID NO: 128293 - DNA, 25 bp, Homo sapien
ggattctcctcgatccttgatgttt

SEQ ID NO: 128294 - DNA, 25 bp, Homo sapien
ggattctcctcgttccttgatgttt

SEQ ID NO: 128295 - DNA, 25 bp, Homo sapien
gacacttgtctttaactgtgaattt

SEQ ID NO: 128296 - DNA, 25 bp, Homo sapien
gacacttgtcttaaactgtgaattt

SEQ ID NO: 128297 - DNA, 25 bp, Homo sapien
cagacactttcgagattcgaatttt

SEQ ID NO: 128298 - DNA, 25 bp, Homo sapien
cagacactttcgtgattcgaatttt

SEQ ID NO: 128299 - DNA, 25 bp, Homo sapien
atgtgtcaccttaatcgattgtagt

SEQ ID NO: 128300 - DNA, 25 bp, Homo sapien
atgtgtcacctttatcgattgtagt

SEQ ID NO: 128301 - DNA, 25 bp, Homo sapien
acgattcttcgacgtcccactttcg

SEQ ID NO: 128302 - DNA, 25 bp, Homo sapien
acgattcttcgaggtcccactttcg

SEQ ID NO: 128303 - DNA, 25 bp, Homo sapien
ccccttcttctggttcaagtgttgt

SEQ ID NO: 128304 - DNA, 25 bp, Homo sapien
ccccttcttctgcttcaagtgttgt

SEQ ID NO: 128305 - DNA, 25 bp, Homo sapien
acgccctcttggatcgcgaattcct

SEQ ID NO: 128306 - DNA, 25 bp, Homo sapien
acgccctcttggttcgcgaattcct

SEQ ID NO: 128307 - DNA, 25 bp, Homo sapien
tgccactctccgtgggaagtgtcct

SEQ ID NO: 128308 - DNA, 25 bp, Homo sapien
tgccactctccgagggaagtgtcct

SEQ ID NO: 128309 - DNA, 25 bp, Homo sapien
cccgcgtgagcaggtgtccgccgtt

SEQ ID NO: 128310 - DNA, 25 bp, Homo sapien
cccgcgtgagcacgtgtccgccgtt

SEQ ID NO: 128311 - DNA, 25 bp, Homo sapien
cccccgggcggaccgcgacccctct

SEQ ID NO: 128312 - DNA, 25 bp, Homo sapien
cccccgggcggagcgcgacccctct

SEQ ID NO: 128313 - DNA, 25 bp, Homo sapien
atcagtcgggcgtgccgctgctctc

SEQ ID NO: 128314 - DNA, 25 bp, Homo sapien
atcagtcgggcgagccgctgctctc

SEQ ID NO: 128315 - DNA, 25 bp, Homo sapien
atatgataaatgtgctgtctccttt

SEQ ID NO: 128316 - DNA, 25 bp, Homo sapien
atatgataaatgagctgtctccttt

SEQ ID NO: 128317 - DNA, 25 bp, Homo sapien
acatgaaaagtcgtatcaacgccaa

SEQ ID NO: 128318 - DNA, 25 bp, Homo sapien
acatgaaaagtcctatcaacgccaa

SEQ ID NO: 128319 - DNA, 25 bp, Homo sapien
caggaacaaggaaaccaactgatag

SEQ ID NO: 128320 - DNA, 25 bp, Homo sapien
caggaacaaggataccaactgatag

SEQ ID NO: 128321 - DNA, 25 bp, Homo sapien
ccgacaccactgacacagtttagga

SEQ ID NO: 128322 - DNA, 25 bp, Homo sapien
ccgacaccactgtcacagtttagga

SEQ ID NO: 128323 - DNA, 25 bp, Homo sapien
ggttttaccctgctataatcagtag

SEQ ID NO: 128324 - DNA, 25 bp, Homo sapien
ggttttaccctggtataatcagtag

SEQ ID NO: 128325 - DNA, 25 bp, Homo sapien
tcaagtagcccgttactcgaagggt

SEQ ID NO: 128326 - DNA, 25 bp, Homo sapien
tcaagtagcccgatactcgaagggt

SEQ ID NO: 128327 - DNA, 25 bp, Homo sapien
gaaacatctaccacagtaaaatggt

SEQ ID NO: 128328 - DNA, 25 bp, Homo sapien
gaaacatctacctcagtaaaatggt

SEQ ID NO: 128329 - DNA, 25 bp, Homo sapien
tggtggacccggtcccgatccggat

SEQ ID NO: 128330 - DNA, 25 bp, Homo sapien
tggtggacccggacccgatccggat

SEQ ID NO: 128331 - DNA, 25 bp, Homo sapien
atacgtcctcggtgcgcggtcccgg

SEQ ID NO: 128332 - DNA, 25 bp, Homo sapien
atacgtcctcggagcgcggtcccgg

SEQ ID NO: 128333 - DNA, 25 bp, Homo sapien
gtgtacgcaaagaagacgggtcccc

SEQ ID NO: 128334 - DNA, 25 bp, Homo sapien
gtgtacgcaaagtagacgggtcccc

SEQ ID NO: 128335 - DNA, 25 bp, Homo sapien
cggacgtgacgtacctggtcccggt

SEQ ID NO: 128336 - DNA, 25 bp, Homo sapien
cggacgtgacgttcctggtcccggt

SEQ ID NO: 128337 - DNA, 25 bp, Homo sapien
cctccgtacgttctcgctcttaggt

SEQ ID NO: 128338 - DNA, 25 bp, Homo sapien
cctccgtacgttgtcgctcttaggt

SEQ ID NO: 128339 - DNA, 25 bp, Homo sapien
cagaagctatattttgtgtccttgg

SEQ ID NO: 128340 - DNA, 25 bp, Homo sapien
cagaagctatatattgtgtccttgg

SEQ ID NO: 128341 - DNA, 25 bp, Homo sapien
gaaaatcgtccaccattgtcttcag

SEQ ID NO: 128342 - DNA, 25 bp, Homo sapien
gaaaatcgtccagcattgtcttcag

SEQ ID NO: 128343 - DNA, 25 bp, Homo sapien
gtagacacacccagtgattttgtaa

SEQ ID NO: 128344 - DNA, 25 bp, Homo sapien
gtagacacaccctgtgattttgtaa

SEQ ID NO: 128345 - DNA, 25 bp, Homo sapien
ctgaaccaaccgagcgtttgtgaac

SEQ ID NO: 128346 - DNA, 25 bp, Homo sapien
ctgaaccaaccgtgcgtttgtgaac

SEQ ID NO: 128347 - DNA, 25 bp, Homo sapien
gtgacaaggacgtcctgttgttgta

SEQ ID NO: 128348 - DNA, 25 bp, Homo sapien
gtgacaaggacgacctgttgttgta

SEQ ID NO: 128349 - DNA, 25 bp, Homo sapien
gagaggagtcgctcctgtgccacga

SEQ ID NO: 128350 - DNA, 25 bp, Homo sapien
gagaggagtcgcacctgtgccacga

SEQ ID NO: 128351 - DNA, 25 bp, Homo sapien
aggagtctgagactgctgctgcggt

SEQ ID NO: 128352 - DNA, 25 bp, Homo sapien
aggagtctgagagtgctgctgcggt

SEQ ID NO: 128353 - DNA, 25 bp, Homo sapien
agagggagatacactccgtagtcat

SEQ ID NO: 128354 - DNA, 25 bp, Homo sapien
agagggagatactctccgtagtcat

SEQ ID NO: 128355 - DNA, 25 bp, Homo sapien
ggacccgacgagacattccgtccat

SEQ ID NO: 128356 - DNA, 25 bp, Homo sapien
ggacccgacgagtcattccgtccat

SEQ ID NO: 128357 - DNA, 25 bp, Homo sapien
ttccggacagctcagtggacgcaca

SEQ ID NO: 128358 - DNA, 25 bp, Homo sapien
ttccggacagctgagtggacgcaca

SEQ ID NO: 128359 - DNA, 25 bp, Homo sapien
gtgaagtagaggtagtagtctctcc

SEQ ID NO: 128360 - DNA, 25 bp, Homo sapien
gtgaagtagaggaagtagtctctcc

SEQ ID NO: 128361 - DNA, 25 bp, Homo sapien
tgtaggaagtgaaatgttcaccgtc

SEQ ID NO: 128362 - DNA, 25 bp, Homo sapien
tgtaggaagtgatatgttcaccgtc

SEQ ID NO: 128363 - DNA, 25 bp, Homo sapien
aatcaaggtacgtgttagttggctc

SEQ ID NO: 128364 - DNA, 25 bp, Homo sapien
aatcaaggtacgagttagttggctc

SEQ ID NO: 128365 - DNA, 25 bp, Homo sapien
aaccctgactagtatcacgtaggat

SEQ ID NO: 128366 - DNA, 25 bp, Homo sapien
aaccctgactagaatcacgtaggat

SEQ ID NO: 128367 - DNA, 25 bp, Homo sapien
tctctacaggaatgatcactgtgta

SEQ ID NO: 128368 - DNA, 25 bp, Homo sapien
tctctacaggaaagatcactgtgta

SEQ ID NO: 128369 - DNA, 25 bp, Homo sapien
gtcttaatgacaacgatcgctctta

SEQ ID NO: 128370 - DNA, 25 bp, Homo sapien
gtcttaatgacatcgatcgctctta

SEQ ID NO: 128371 - DNA, 25 bp, Homo sapien
tgcgttatagtaaatgacctcttga

SEQ ID NO: 128372 - DNA, 25 bp, Homo sapien
tgcgttatagtatatgacctcttga

SEQ ID NO: 128373 - DNA, 25 bp, Homo sapien
tgacggttgcacagtcaccacctgg

SEQ ID NO: 128374 - DNA, 25 bp, Homo sapien
tgacggttgcactgtcaccacctgg

SEQ ID NO: 128375 - DNA, 25 bp, Homo sapien
tgtatgtgtccctgcgacatttgtc

SEQ ID NO: 128376 - DNA, 25 bp, Homo sapien
tgtatgtgtcccagcgacatttgtc

SEQ ID NO: 128377 - DNA, 25 bp, Homo sapien
tttggctacctagactttcgtagtc

SEQ ID NO: 128378 - DNA, 25 bp, Homo sapien
tttggctacctacactttcgtagtc

SEQ ID NO: 128379 - DNA, 25 bp, Homo sapien
ctttaggttcgtctcttactacatg

SEQ ID NO: 128380 - DNA, 25 bp, Homo sapien
ctttaggttcgtgtcttactacatg

SEQ ID NO: 128381 - DNA, 25 bp, Homo sapien
gggtcacgtttgtttcaatttttcg

SEQ ID NO: 128382 - DNA, 25 bp, Homo sapien
gggtcacgtttgattcaatttttcg

SEQ ID NO: 128383 - DNA, 25 bp, Homo sapien
ttttagatgcgttcaaactagtttc

SEQ ID NO: 128384 - DNA, 25 bp, Homo sapien
ttttagatgcgtacaaactagtttc

SEQ ID NO: 128385 - DNA, 25 bp, Homo sapien
tttagaatccctaaacgaagttaag

SEQ ID NO: 128386 - DNA, 25 bp, Homo sapien
tttagaatcccttaacgaagttaag

SEQ ID NO: 128387 - DNA, 25 bp, Homo sapien
ctaagaaggcgtcgtcagaagagaa

SEQ ID NO: 128388 - DNA, 25 bp, Homo sapien
ctaagaaggcgtggtcagaagagaa

SEQ ID NO: 128389 - DNA, 25 bp, Homo sapien
gttggtgaaactggttaatatccac

SEQ ID NO: 128390 - DNA, 25 bp, Homo sapien
gttggtgaaactcgttaatatccac

SEQ ID NO: 128391 - DNA, 25 bp, Homo sapien
gttcggtactcctcatgtactccac

SEQ ID NO: 128392 - DNA, 25 bp, Homo sapien
gttcggtactccacatgtactccac

SEQ ID NO: 128393 - DNA, 25 bp, Homo sapien
ttaacggaagtcaaatgaccgtagg

SEQ ID NO: 128394 - DNA, 25 bp, Homo sapien
ttaacggaagtctaatgaccgtagg

SEQ ID NO: 128395 - DNA, 25 bp, Homo sapien
gttgtgcacctgttttaaccgaacg

SEQ ID NO: 128396 - DNA, 25 bp, Homo sapien
gttgtgcacctgatttaaccgaacg

SEQ ID NO: 128397 - DNA, 25 bp, Homo sapien
tgtgtccctgactccgacgacactg

SEQ ID NO: 128398 - DNA, 25 bp, Homo sapien
tgtgtccctgacaccgacgacactg

SEQ ID NO: 128399 - DNA, 25 bp, Homo sapien
gtatacagtaatctcgatacacagt

SEQ ID NO: 128400 - DNA, 25 bp, Homo sapien
gtatacagtaatgtcgatacacagt

SEQ ID NO: 128401 - DNA, 25 bp, Homo sapien
ggatttgtcataaatcagataacct

SEQ ID NO: 128402 - DNA, 25 bp, Homo sapien
ggatttgtcatatatcagataacct

SEQ ID NO: 128403 - DNA, 25 bp, Homo sapien
cgttttttacaacgaaacagtctgt

SEQ ID NO: 128404 - DNA, 25 bp, Homo sapien
cgttttttacaaggaaacagtctgt

SEQ ID NO: 128405 - DNA, 25 bp, Homo sapien
cggtcgtttttatagttcccagttt

SEQ ID NO: 128406 - DNA, 25 bp, Homo sapien
cggtcgtttttaaagttcccagttt

SEQ ID NO: 128407 - DNA, 25 bp, Homo sapien
acgctttttaggtgtcaccggtgtc

SEQ ID NO: 128408 - DNA, 25 bp, Homo sapien
acgctttttaggagtcaccggtgtc

SEQ ID NO: 128409 - DNA, 25 bp, Homo sapien
gtggtctcgggaacgcctccgtgtc

SEQ ID NO: 128410 - DNA, 25 bp, Homo sapien
gtggtctcgggatcgcctccgtgtc

SEQ ID NO: 128411 - DNA, 25 bp, Homo sapien
aggtttgtgtcgtctacctctcctg

SEQ ID NO: 128412 - DNA, 25 bp, Homo sapien
aggtttgtgtcgactacctctcctg

SEQ ID NO: 128413 - DNA, 25 bp, Homo sapien
ctaatgtcctcgacggtgaacactc

SEQ ID NO: 128414 - DNA, 25 bp, Homo sapien
ctaatgtcctcgtcggtgaacactc

SEQ ID NO: 128415 - DNA, 25 bp, Homo sapien
gagaggtcacacttaatagaataca

SEQ ID NO: 128416 - DNA, 25 bp, Homo sapien
gagaggtcacacataatagaataca

SEQ ID NO: 128417 - DNA, 25 bp, Homo sapien
aaagacggtcacacagaaggttccg

SEQ ID NO: 128418 - DNA, 25 bp, Homo sapien
aaagacggtcactcagaaggttccg

SEQ ID NO: 128419 - DNA, 25 bp, Homo sapien
ctgcgggagtctaaggagctccgac

SEQ ID NO: 128420 - DNA, 25 bp, Homo sapien
ctgcgggagtcttaggagctccgac

SEQ ID NO: 128421 - DNA, 25 bp, Homo sapien
accggctggcaggactgagcctcta

SEQ ID NO: 128422 - DNA, 25 bp, Homo sapien
accggctggcagcactgagcctcta

SEQ ID NO: 128423 - DNA, 25 bp, Homo sapien
cgtgtccagtcatcctgagtcctcc

SEQ ID NO: 128424 - DNA, 25 bp, Homo sapien
cgtgtccagtcaacctgagtcctcc

SEQ ID NO: 128425 - DNA, 25 bp, Homo sapien
ggcgggtacctacatcagacccacg

SEQ ID NO: 128426 - DNA, 25 bp, Homo sapien
ggcgggtacctagatcagacccacg

SEQ ID NO: 128427 - DNA, 25 bp, Homo sapien
tctgtggggtttcgacaaaatacgg

SEQ ID NO: 128428 - DNA, 25 bp, Homo sapien
tctgtggggtttggacaaaatacgg

SEQ ID NO: 128429 - DNA, 25 bp, Homo sapien
ttctggaaatgacctaccaaggaag

SEQ ID NO: 128430 - DNA, 25 bp, Homo sapien
ttctggaaatgagctaccaaggaag

SEQ ID NO: 128431 - DNA, 25 bp, Homo sapien
tttggacaactcacacttaggagaa

SEQ ID NO: 128432 - DNA, 25 bp, Homo sapien
tttggacaactctcacttaggagaa

SEQ ID NO: 128433 - DNA, 25 bp, Homo sapien
ttagaaaatcctaaccgtggtagaa

SEQ ID NO: 128434 - DNA, 25 bp, Homo sapien
ttagaaaatccttaccgtggtagaa

SEQ ID NO: 128435 - DNA, 25 bp, Homo sapien
atttgaaagttctctgacgaaaact

SEQ ID NO: 128436 - DNA, 25 bp, Homo sapien
atttgaaagttcactgacgaaaact

SEQ ID NO: 128437 - DNA, 25 bp, Homo sapien
ctaaatgtacactagacgaatatag

SEQ ID NO: 128438 - DNA, 25 bp, Homo sapien
ctaaatgtacacaagacgaatatag

SEQ ID NO: 128439 - DNA, 25 bp, Homo sapien
ttgctgcacacgacttggtacttca

SEQ ID NO: 128440 - DNA, 25 bp, Homo sapien
ttgctgcacacgtcttggtacttca

SEQ ID NO: 128441 - DNA, 25 bp, Homo sapien
tctcacgacgacagcgggaccatca

SEQ ID NO: 128442 - DNA, 25 bp, Homo sapien
tctcacgacgactgcgggaccatca

SEQ ID NO: 128443 - DNA, 25 bp, Homo sapien
tctgtaaacaaacacaccatactta

SEQ ID NO: 128444 - DNA, 25 bp, Homo sapien
tctgtaaacaaagacaccatactta

SEQ ID NO: 128445 - DNA, 25 bp, Homo sapien
gagagtaaccaaatactcaatttag

SEQ ID NO: 128446 - DNA, 25 bp, Homo sapien
gagagtaaccaattactcaatttag

SEQ ID NO: 128447 - DNA, 25 bp, Homo sapien
aggaaccactagtcccgtagacaag

SEQ ID NO: 128448 - DNA, 25 bp, Homo sapien
aggaaccactagacccgtagacaag

SEQ ID NO: 128449 - DNA, 25 bp, Homo sapien
gaaattacccaggacccgttcatac

SEQ ID NO: 128450 - DNA, 25 bp, Homo sapien
gaaattacccagcacccgttcatac

SEQ ID NO: 128451 - DNA, 25 bp, Homo sapien
gcgtgagtttgaagtcccgggaaac

SEQ ID NO: 128452 - DNA, 25 bp, Homo sapien
gcgtgagtttgatgtcccgggaaac

SEQ ID NO: 128453 - DNA, 25 bp, Homo sapien
gtaagttttcgtagaccgggtataa

SEQ ID NO: 128454 - DNA, 25 bp, Homo sapien
gtaagttttcgttgaccgggtataa

SEQ ID NO: 128455 - DNA, 25 bp, Homo sapien
aacttcaactacagcgtcgggacca

SEQ ID NO: 128456 - DNA, 25 bp, Homo sapien
aacttcaactactgcgtcgggacca

SEQ ID NO: 128457 - DNA, 25 bp, Homo sapien
acgacgagcctctccgaggttcttt

SEQ ID NO: 128458 - DNA, 25 bp, Homo sapien
acgacgagcctcaccgaggttcttt

SEQ ID NO: 128459 - DNA, 25 bp, Homo sapien
ttgaaccgaccctaagagttgtata

SEQ ID NO: 128460 - DNA, 25 bp, Homo sapien
ttgaaccgacccaaagagttgtata

SEQ ID NO: 128461 - DNA, 25 bp, Homo sapien
cgggaagtgaactcaagactgtaag

SEQ ID NO: 128462 - DNA, 25 bp, Homo sapien
cgggaagtgaacacaagactgtaag

SEQ ID NO: 128463 - DNA, 25 bp, Homo sapien
gaaaaattagacttcacatctgaag

SEQ ID NO: 128464 - DNA, 25 bp, Homo sapien
gaaaaattagacatcacatctgaag

SEQ ID NO: 128465 - DNA, 25 bp, Homo sapien
taagtgatgagtattaagtcctgat

SEQ ID NO: 128466 - DNA, 25 bp, Homo sapien
taagtgatgagttttaagtcctgat

SEQ ID NO: 128467 - DNA, 25 bp, Homo sapien
tctaagacggaagtgttaatctcaa

SEQ ID NO: 128468 - DNA, 25 bp, Homo sapien
tctaagacggaactgttaatctcaa

SEQ ID NO: 128469 - DNA, 25 bp, Homo sapien
tataggtggaagttaaaccctacaa

SEQ ID NO: 128470 - DNA, 25 bp, Homo sapien
tataggtggaagataaaccctacaa

SEQ ID NO: 128471 - DNA, 25 bp, Homo sapien
ttcaggtaacctattattacgatgg

SEQ ID NO: 128472 - DNA, 25 bp, Homo sapien
ttcaggtaaccttttattacgatgg

SEQ ID NO: 128473 - DNA, 25 bp, Homo sapien
tgtatcttctcaagttactataagt

SEQ ID NO: 128474 - DNA, 25 bp, Homo sapien
tgtatcttctcatgttactataagt

SEQ ID NO: 128475 - DNA, 25 bp, Homo sapien
agtcttcgtctgatcgttaagagtt

SEQ ID NO: 128476 - DNA, 25 bp, Homo sapien
agtcttcgtctgttcgttaagagtt

SEQ ID NO: 128477 - DNA, 25 bp, Homo sapien
aaacagtctttctttagggatactg

SEQ ID NO: 128478 - DNA, 25 bp, Homo sapien
aaacagtctttcattagggatactg

SEQ ID NO: 128479 - DNA, 25 bp, Homo sapien
cacgtaccatcgatctcagggaggt

SEQ ID NO: 128480 - DNA, 25 bp, Homo sapien
cacgtaccatcgttctcagggaggt

SEQ ID NO: 128481 - DNA, 25 bp, Homo sapien
cgtcgtccagtcctacagcaggagg

SEQ ID NO: 128482 - DNA, 25 bp, Homo sapien
cgtcgtccagtcgtacagcaggagg

SEQ ID NO: 128483 - DNA, 25 bp, Homo sapien
ttccgagtcgagacgtcaagacggt

SEQ ID NO: 128484 - DNA, 25 bp, Homo sapien
ttccgagtcgagtcgtcaagacggt

SEQ ID NO: 128485 - DNA, 25 bp, Homo sapien
tcaccgagtaggagacggagtcgat

SEQ ID NO: 128486 - DNA, 25 bp, Homo sapien
tcaccgagtaggtgacggagtcgat

SEQ ID NO: 128487 - DNA, 25 bp, Homo sapien
agtgcattacacgggtatcggccga

SEQ ID NO: 128488 - DNA, 25 bp, Homo sapien
agtgcattacaccggtatcggccga

SEQ ID NO: 128489 - DNA, 25 bp, Homo sapien
gtcggactatcagtgtaacctccag

SEQ ID NO: 128490 - DNA, 25 bp, Homo sapien
gtcggactatcactgtaacctccag

SEQ ID NO: 128491 - DNA, 25 bp, Homo sapien
cacggtgtcctcaacagaattctcc

SEQ ID NO: 128492 - DNA, 25 bp, Homo sapien
cacggtgtcctctacagaattctcc

SEQ ID NO: 128493 - DNA, 25 bp, Homo sapien
ccccgtacttctggtaaattttgtc

SEQ ID NO: 128494 - DNA, 25 bp, Homo sapien
ccccgtacttctcgtaaattttgtc

SEQ ID NO: 128495 - DNA, 25 bp, Homo sapien
cgcggtaaccggtacaacatcattc

SEQ ID NO: 128496 - DNA, 25 bp, Homo sapien
cgcggtaaccggaacaacatcattc

SEQ ID NO: 128497 - DNA, 25 bp, Homo sapien
gtcaaccgaaagaacactcagtcta

SEQ ID NO: 128498 - DNA, 25 bp, Homo sapien
gtcaaccgaaagtacactcagtcta

SEQ ID NO: 128499 - DNA, 25 bp, Homo sapien
ggagccgaacagtgtagacgttcat

SEQ ID NO: 128500 - DNA, 25 bp, Homo sapien
ggagccgaacagagtagacgttcat

SEQ ID NO: 128501 - DNA, 25 bp, Homo sapien
gtgagcgggaagagcacggtctagt

SEQ ID NO: 128502 - DNA, 25 bp, Homo sapien
gtgagcgggaagtgcacggtctagt

SEQ ID NO: 128503 - DNA, 25 bp, Homo sapien
ctttactcgatagacctcccgggtg

SEQ ID NO: 128504 - DNA, 25 bp, Homo sapien
ctttactcgatacacctcccgggtg

SEQ ID NO: 128505 - DNA, 25 bp, Homo sapien
ccacgagaacactactcgttgaatg

SEQ ID NO: 128506 - DNA, 25 bp, Homo sapien
ccacgagaacacaactcgttgaatg

SEQ ID NO: 128507 - DNA, 25 bp, Homo sapien
ggcacgagccctttccggtcacgaa

SEQ ID NO: 128508 - DNA, 25 bp, Homo sapien
ggcacgagccctatccggtcacgaa

SEQ ID NO: 128509 - DNA, 25 bp, Homo sapien
tagcgagaccctcttcataacggtc

SEQ ID NO: 128510 - DNA, 25 bp, Homo sapien
tagcgagaccctgttcataacggtc

SEQ ID NO: 128511 - DNA, 25 bp, Homo sapien
aacgtagaacgatcctttttatggc

SEQ ID NO: 128512 - DNA, 25 bp, Homo sapien
aacgtagaacgaacctttttatggc

SEQ ID NO: 128513 - DNA, 25 bp, Homo sapien
gacaacgaggaggtttcttccaacc

SEQ ID NO: 128514 - DNA, 25 bp, Homo sapien
gacaacgaggagctttcttccaacc

SEQ ID NO: 128515 - DNA, 25 bp, Homo sapien
atgtaggatctactcataacataag

SEQ ID NO: 128516 - DNA, 25 bp, Homo sapien
atgtaggatctagtcataacataag

SEQ ID NO: 128517 - DNA, 25 bp, Homo sapien
atcttcagtctatacattcataact

SEQ ID NO: 128518 - DNA, 25 bp, Homo sapien
atcttcagtctaaacattcataact

SEQ ID NO: 128519 - DNA, 25 bp, Homo sapien
gaaaattctttctaagtgttttata

SEQ ID NO: 128520 - DNA, 25 bp, Homo sapien
gaaaattctttcaaagtgttttata

SEQ ID NO: 128521 - DNA, 25 bp, Homo sapien
tgaagaaatgtgacgacttttgtaa

SEQ ID NO: 128522 - DNA, 25 bp, Homo sapien
tgaagaaatgtgtcgacttttgtaa

SEQ ID NO: 128523 - DNA, 25 bp, Homo sapien
cagaatgaccatcgaatgtcagtga

SEQ ID NO: 128524 - DNA, 25 bp, Homo sapien
cagaatgaccatggaatgtcagtga

SEQ ID NO: 128525 - DNA, 25 bp, Homo sapien
aggattgcgcttgcaatgtcgataa

SEQ ID NO: 128526 - DNA, 25 bp, Homo sapien
aggattgcgcttccaatgtcgataa

SEQ ID NO: 128527 - DNA, 25 bp, Homo sapien
gctcggactttcaatcgttgtcact

SEQ ID NO: 128528 - DNA, 25 bp, Homo sapien
gctcggactttctatcgttgtcact

SEQ ID NO: 128529 - DNA, 25 bp, Homo sapien
cgaaccgcaactcgtacagctacgt

SEQ ID NO: 128530 - DNA, 25 bp, Homo sapien
cgaaccgcaactggtacagctacgt

SEQ ID NO: 128531 - DNA, 25 bp, Homo sapien
gcccgaacaccagagggtacgtctg

SEQ ID NO: 128532 - DNA, 25 bp, Homo sapien
gcccgaacaccacagggtacgtctg

SEQ ID NO: 128533 - DNA, 25 bp, Homo sapien
tgcgtcgcaatcaagtgatcctccc

SEQ ID NO: 128534 - DNA, 25 bp, Homo sapien
tgcgtcgcaatctagtgatcctccc

SEQ ID NO: 128535 - DNA, 25 bp, Homo sapien
accagtctggggtatttatcctccc

SEQ ID NO: 128536 - DNA, 25 bp, Homo sapien
accagtctggggaatttatcctccc

SEQ ID NO: 128537 - DNA, 25 bp, Homo sapien
cagatccgggtgatccgaagggaac

SEQ ID NO: 128538 - DNA, 25 bp, Homo sapien
cagatccgggtgttccgaagggaac

SEQ ID NO: 128539 - DNA, 25 bp, Homo sapien
aggtccgtcccgtttaacccgggac

SEQ ID NO: 128540 - DNA, 25 bp, Homo sapien
aggtccgtcccgattaacccgggac

SEQ ID NO: 128541 - DNA, 25 bp, Homo sapien
aagtgtcgtcaactgtttccccatc

SEQ ID NO: 128542 - DNA, 25 bp, Homo sapien
aagtgtcgtcaagtgtttccccatc

SEQ ID NO: 128543 - DNA, 25 bp, Homo sapien
tgttagaaccttactctccagtgtt

SEQ ID NO: 128544 - DNA, 25 bp, Homo sapien
tgttagaacctttctctccagtgtt

SEQ ID NO: 128545 - DNA, 25 bp, Homo sapien
ttgaggaccatccacagttaccggt

SEQ ID NO: 128546 - DNA, 25 bp, Homo sapien
ttgaggaccatcgacagttaccggt

SEQ ID NO: 128547 - DNA, 25 bp, Homo sapien
agttggagccggtgcaagtagacct

SEQ ID NO: 128548 - DNA, 25 bp, Homo sapien
agttggagccggagcaagtagacct

SEQ ID NO: 128549 - DNA, 25 bp, Homo sapien
agagcgacttcgacttaaaagtcac

SEQ ID NO: 128550 - DNA, 25 bp, Homo sapien
agagcgacttcgtcttaaaagtcac

SEQ ID NO: 128551 - DNA, 25 bp, Homo sapien
ggcgggggtcggcttacaaactaca

SEQ ID NO: 128552 - DNA, 25 bp, Homo sapien
ggcgggggtcgggttacaaactaca

SEQ ID NO: 128553 - DNA, 25 bp, Homo sapien
aagggggcacggaaccactgctact

SEQ ID NO: 128554 - DNA, 25 bp, Homo sapien
aagggggcacggtaccactgctact

SEQ ID NO: 128555 - DNA, 25 bp, Homo sapien
agggcgacgaaggactaccatggac

SEQ ID NO: 128556 - DNA, 25 bp, Homo sapien
agggcgacgaagcactaccatggac

SEQ ID NO: 128557 - DNA, 25 bp, Homo sapien
tcgagacgaccaactgctccgacat

SEQ ID NO: 128558 - DNA, 25 bp, Homo sapien
tcgagacgaccatctgctccgacat

SEQ ID NO: 128559 - DNA, 25 bp, Homo sapien
cgtacgcgaactgactccctgaaag

SEQ ID NO: 128560 - DNA, 25 bp, Homo sapien
cgtacgcgaactcactccctgaaag

SEQ ID NO: 128561 - DNA, 25 bp, Homo sapien
taaggtccggtcctaagttccggga

SEQ ID NO: 128562 - DNA, 25 bp, Homo sapien
taaggtccggtcgtaagttccggga

SEQ ID NO: 128563 - DNA, 25 bp, Homo sapien
actttgtttgtcaagactctggcaa

SEQ ID NO: 128564 - DNA, 25 bp, Homo sapien
actttgtttgtctagactctggcaa

SEQ ID NO: 128565 - DNA, 25 bp, Homo sapien
acttagtattttggactttgttccc

SEQ ID NO: 128566 - DNA, 25 bp, Homo sapien
acttagtattttcgactttgttccc

SEQ ID NO: 128567 - DNA, 25 bp, Homo sapien
aggtcctcaggatgggcccagtcac

SEQ ID NO: 128568 - DNA, 25 bp, Homo sapien
aggtcctcaggaagggcccagtcac

SEQ ID NO: 128569 - DNA, 25 bp, Homo sapien
aacatcattagaacggacccatccg

SEQ ID NO: 128570 - DNA, 25 bp, Homo sapien
aacatcattagatcggacccatccg

SEQ ID NO: 128571 - DNA, 25 bp, Homo sapien
cgaactccgacttttcatcgaacgg

SEQ ID NO: 128572 - DNA, 25 bp, Homo sapien
cgaactccgactattcatcgaacgg

SEQ ID NO: 128573 - DNA, 25 bp, Homo sapien
cacatagagactgtgtcagagtggg

SEQ ID NO: 128574 - DNA, 25 bp, Homo sapien
cacatagagactctgtcagagtggg

SEQ ID NO: 128575 - DNA, 25 bp, Homo sapien
aactatgatactcacctcaacaatt

SEQ ID NO: 128576 - DNA, 25 bp, Homo sapien
aactatgatactgacctcaacaatt

SEQ ID NO: 128577 - DNA, 25 bp, Homo sapien
ccaaggccaacgcatatctagtact

SEQ ID NO: 128578 - DNA, 25 bp, Homo sapien
ccaaggccaacggatatctagtact

SEQ ID NO: 128579 - DNA, 25 bp, Homo sapien
gaaagaacagaggaagtcacgcatg

SEQ ID NO: 128580 - DNA, 25 bp, Homo sapien
gaaagaacagagcaagtcacgcatg

SEQ ID NO: 128581 - DNA, 25 bp, Homo sapien
caaagtacaaggtacttcgaatctt

SEQ ID NO: 128582 - DNA, 25 bp, Homo sapien
caaagtacaaggaacttcgaatctt

SEQ ID NO: 128583 - DNA, 25 bp, Homo sapien
ctggagagtaaggtcttcagatctt

SEQ ID NO: 128584 - DNA, 25 bp, Homo sapien
ctggagagtaagctcttcagatctt

SEQ ID NO: 128585 - DNA, 25 bp, Homo sapien
agacggagacccttgtgatcactag

SEQ ID NO: 128586 - DNA, 25 bp, Homo sapien
agacggagacccatgtgatcactag

SEQ ID NO: 128587 - DNA, 25 bp, Homo sapien
taaacggtaactccttttatagtgg

SEQ ID NO: 128588 - DNA, 25 bp, Homo sapien
taaacggtaactgcttttatagtgg

SEQ ID NO: 128589 - DNA, 25 bp, Homo sapien
tgagacgtaggaaggaatcgttcca

SEQ ID NO: 128590 - DNA, 25 bp, Homo sapien
tgagacgtaggatggaatcgttcca

SEQ ID NO: 128591 - DNA, 25 bp, Homo sapien
tcaggtgaatacgaagtcgtctcca

SEQ ID NO: 128592 - DNA, 25 bp, Homo sapien
tcaggtgaataccaagtcgtctcca

SEQ ID NO: 128593 - DNA, 25 bp, Homo sapien
cctgctggtaagactcggtcactca

SEQ ID NO: 128594 - DNA, 25 bp, Homo sapien
cctgctggtaagtctcggtcactca

SEQ ID NO: 128595 - DNA, 25 bp, Homo sapien
ccggggatattactgtgtacatacc

SEQ ID NO: 128596 - DNA, 25 bp, Homo sapien
ccggggatattagtgtgtacatacc

SEQ ID NO: 128597 - DNA, 25 bp, Homo sapien
gactttcgattgaagggactatctc

SEQ ID NO: 128598 - DNA, 25 bp, Homo sapien
gactttcgattgtagggactatctc

SEQ ID NO: 128599 - DNA, 25 bp, Homo sapien
cactttactgggtaccgcagacctg

SEQ ID NO: 128600 - DNA, 25 bp, Homo sapien
cactttactgggaaccgcagacctg

SEQ ID NO: 128601 - DNA, 25 bp, Homo sapien
catcgaactgttgaccaccacaggg

SEQ ID NO: 128602 - DNA, 25 bp, Homo sapien
catcgaactgttcaccaccacaggg

SEQ ID NO: 128603 - DNA, 25 bp, Homo sapien
cgacgatctccgaccaacgactgag

SEQ ID NO: 128604 - DNA, 25 bp, Homo sapien
cgacgatctccgtccaacgactgag

SEQ ID NO: 128605 - DNA, 25 bp, Homo sapien
tcgacccgggtgctcacaaacgaaa

SEQ ID NO: 128606 - DNA, 25 bp, Homo sapien
tcgacccgggtggtcacaaacgaaa

SEQ ID NO: 128607 - DNA, 25 bp, Homo sapien
ccggtgtctcggaacacaagcgagg

SEQ ID NO: 128608 - DNA, 25 bp, Homo sapien
ccggtgtctcggtacacaagcgagg

SEQ ID NO: 128609 - DNA, 25 bp, Homo sapien
tcctcttttcggtctaccactgtga

SEQ ID NO: 128610 - DNA, 25 bp, Homo sapien
tcctcttttcggactaccactgtga

SEQ ID NO: 128611 - DNA, 25 bp, Homo sapien
ttagtattagagtgacctcacctat

SEQ ID NO: 128612 - DNA, 25 bp, Homo sapien
ttagtattagagagacctcacctat

SEQ ID NO: 128613 - DNA, 25 bp, Homo sapien
ctttgatggtttaatctacgtctat

SEQ ID NO: 128614 - DNA, 25 bp, Homo sapien
ctttgatggttttatctacgtctat

SEQ ID NO: 128615 - DNA, 25 bp, Homo sapien
tgactttagaggtcctcaacctaca

SEQ ID NO: 128616 - DNA, 25 bp, Homo sapien
tgactttagaggacctcaacctaca

SEQ ID NO: 128617 - DNA, 25 bp, Homo sapien
ttaatagtagtttctcagactttcg

SEQ ID NO: 128618 - DNA, 25 bp, Homo sapien
ttaatagtagttactcagactttcg

SEQ ID NO: 128619 - DNA, 25 bp, Homo sapien
catttaatcttttgtatatgtattt

SEQ ID NO: 128620 - DNA, 25 bp, Homo sapien
catttaatctttagtatatgtattt

SEQ ID NO: 128621 - DNA, 25 bp, Homo sapien
gtctttatctttttctcaggagtga

SEQ ID NO: 128622 - DNA, 25 bp, Homo sapien
gtctttatctttatctcaggagtga

SEQ ID NO: 128623 - DNA, 25 bp, Homo sapien
gacattcatcctgtctcgaagatca

SEQ ID NO: 128624 - DNA, 25 bp, Homo sapien
gacattcatcctctctcgaagatca

SEQ ID NO: 128625 - DNA, 25 bp, Homo sapien
gtacgctctcttcgtcgaacgtaat

SEQ ID NO: 128626 - DNA, 25 bp, Homo sapien
gtacgctctcttggtcgaacgtaat

SEQ ID NO: 128627 - DNA, 25 bp, Homo sapien
ctggacctctgtcagtaacagttgt

SEQ ID NO: 128628 - DNA, 25 bp, Homo sapien
ctggacctctgtgagtaacagttgt

SEQ ID NO: 128629 - DNA, 25 bp, Homo sapien
aaacgtccacatgaacgtcgggtat

SEQ ID NO: 128630 - DNA, 25 bp, Homo sapien
aaacgtccacatcaacgtcgggtat

SEQ ID NO: 128631 - DNA, 25 bp, Homo sapien
taaggttgacgtccaggtacgggtt

SEQ ID NO: 128632 - DNA, 25 bp, Homo sapien
taaggttgacgtgcaggtacgggtt

SEQ ID NO: 128633 - DNA, 25 bp, Homo sapien
caaggtgtccgactggacggtacag

SEQ ID NO: 128634 - DNA, 25 bp, Homo sapien
caaggtgtccgagtggacggtacag

SEQ ID NO: 128635 - DNA, 25 bp, Homo sapien
tctcgtcacgctacgtcgggtcgac

SEQ ID NO: 128636 - DNA, 25 bp, Homo sapien
tctcgtcacgcttcgtcgggtcgac

SEQ ID NO: 128637 - DNA, 25 bp, Homo sapien
aggtaactctcgtacaccgggggac

SEQ ID NO: 128638 - DNA, 25 bp, Homo sapien
aggtaactctcgaacaccgggggac

SEQ ID NO: 128639 - DNA, 25 bp, Homo sapien
taggagcaggagtatcctcagctac

SEQ ID NO: 128640 - DNA, 25 bp, Homo sapien
taggagcaggagaatcctcagctac

SEQ ID NO: 128641 - DNA, 25 bp, Homo sapien
agtgtcgagtcacagccgtggaccg

SEQ ID NO: 128642 - DNA, 25 bp, Homo sapien
agtgtcgagtcagagccgtggaccg

SEQ ID NO: 128643 - DNA, 25 bp, Homo sapien
ggagtccaaaaggtctcgtatctca

SEQ ID NO: 128644 - DNA, 25 bp, Homo sapien
ggagtccaaaagctctcgtatctca

SEQ ID NO: 128645 - DNA, 25 bp, Homo sapien
gagtaccacccatagatagacttta

SEQ ID NO: 128646 - DNA, 25 bp, Homo sapien
gagtaccacccaaagatagacttta

SEQ ID NO: 128647 - DNA, 25 bp, Homo sapien
ccgaagacgtccatggttaagttta

SEQ ID NO: 128648 - DNA, 25 bp, Homo sapien
ccgaagacgtccttggttaagttta

SEQ ID NO: 128649 - DNA, 25 bp, Homo sapien
gatcatttcaggtaagtactatact

SEQ ID NO: 128650 - DNA, 25 bp, Homo sapien
gatcatttcaggaaagtactatact

SEQ ID NO: 128651 - DNA, 25 bp, Homo sapien
gcaccgtaggactataacgactata

SEQ ID NO: 128652 - DNA, 25 bp, Homo sapien
gcaccgtaggacaataacgactata

SEQ ID NO: 128653 - DNA, 25 bp, Homo sapien
cgacagctcgctacatcgactatct

SEQ ID NO: 128654 - DNA, 25 bp, Homo sapien
cgacagctcgcttcatcgactatct

SEQ ID NO: 128655 - DNA, 25 bp, Homo sapien
actgtcgttaaaggaggccgctctt

SEQ ID NO: 128656 - DNA, 25 bp, Homo sapien
actgtcgttaaacgaggccgctctt

SEQ ID NO: 128657 - DNA, 25 bp, Homo sapien
atatgagacgtcaatgacgatacgg

SEQ ID NO: 128658 - DNA, 25 bp, Homo sapien
atatgagacgtctatgacgatacgg

SEQ ID NO: 128659 - DNA, 25 bp, Homo sapien
gtcaagggtcgaagtgtcgatacag

SEQ ID NO: 128660 - DNA, 25 bp, Homo sapien
gtcaagggtcgatgtgtcgatacag

SEQ ID NO: 128661 - DNA, 25 bp, Homo sapien
aagtttaccttggtcttcgagtcga

SEQ ID NO: 128662 - DNA, 25 bp, Homo sapien
aagtttaccttgctcttcgagtcga

SEQ ID NO: 128663 - DNA, 25 bp, Homo sapien
agagagtttctatgcccttattctt

SEQ ID NO: 128664 - DNA, 25 bp, Homo sapien
agagagtttctaagcccttattctt

SEQ ID NO: 128665 - DNA, 25 bp, Homo sapien
gtgactcacctcgagtcttttctta

SEQ ID NO: 128666 - DNA, 25 bp, Homo sapien
gtgactcacctccagtcttttctta

SEQ ID NO: 128667 - DNA, 25 bp, Homo sapien
atgaattaaaactactagtaattta

SEQ ID NO: 128668 - DNA, 25 bp, Homo sapien
atgaattaaaacaactagtaattta

SEQ ID NO: 128669 - DNA, 25 bp, Homo sapien
aagaacaacctctcggttagaaacg

SEQ ID NO: 128670 - DNA, 25 bp, Homo sapien
aagaacaacctcacggttagaaacg

SEQ ID NO: 128671 - DNA, 25 bp, Homo sapien
gaaaagaggtcatactctgaagacc

SEQ ID NO: 128672 - DNA, 25 bp, Homo sapien
gaaaagaggtcaaactctgaagacc

SEQ ID NO: 128673 - DNA, 25 bp, Homo sapien
gcatcagggcagaaaccggggaact

SEQ ID NO: 128674 - DNA, 25 bp, Homo sapien
gcatcagggcagtaaccggggaact

SEQ ID NO: 128675 - DNA, 25 bp, Homo sapien
acctcagggcgagtcccccgagaag

SEQ ID NO: 128676 - DNA, 25 bp, Homo sapien
acctcagggcgactcccccgagaag

SEQ ID NO: 128677 - DNA, 25 bp, Homo sapien
tctcgggcactcttcccgtcagaga

SEQ ID NO: 128678 - DNA, 25 bp, Homo sapien
tctcgggcactcatcccgtcagaga

SEQ ID NO: 128679 - DNA, 25 bp, Homo sapien
aaaacacggaccacgttccaccaga

SEQ ID NO: 128680 - DNA, 25 bp, Homo sapien
aaaacacggacctcgttccaccaga

SEQ ID NO: 128681 - DNA, 25 bp, Homo sapien
caacggtctcctttaccccgttagt

SEQ ID NO: 128682 - DNA, 25 bp, Homo sapien
caacggtctcctataccccgttagt

SEQ ID NO: 128683 - DNA, 25 bp, Homo sapien
agaagttcggttctaccccgtaggt

SEQ ID NO: 128684 - DNA, 25 bp, Homo sapien
agaagttcggttgtaccccgtaggt

SEQ ID NO: 128685 - DNA, 25 bp, Homo sapien
tatctaagcgtatatacaccggttt

SEQ ID NO: 128686 - DNA, 25 bp, Homo sapien
tatctaagcgtaaatacaccggttt

SEQ ID NO: 128687 - DNA, 25 bp, Homo sapien
ctcctgtggtagatacagtaccccc

SEQ ID NO: 128688 - DNA, 25 bp, Homo sapien
ctcctgtggtagttacagtaccccc

SEQ ID NO: 128689 - DNA, 25 bp, Homo sapien
ggcctctggggctgtgtctcacgcc

SEQ ID NO: 128690 - DNA, 25 bp, Homo sapien
ggcctctggggcagtgtctcacgcc

SEQ ID NO: 128691 - DNA, 25 bp, Homo sapien
accgacagaggctcggtcaccggtt

SEQ ID NO: 128692 - DNA, 25 bp, Homo sapien
accgacagaggcacggtcaccggtt

SEQ ID NO: 128693 - DNA, 25 bp, Homo sapien
cttctcgatgagtccacaaaggaga

SEQ ID NO: 128694 - DNA, 25 bp, Homo sapien
cttctcgatgagaccacaaaggaga

SEQ ID NO: 128695 - DNA, 25 bp, Homo sapien
ttcagaattcgttcggtaaggacga

SEQ ID NO: 128696 - DNA, 25 bp, Homo sapien
ttcagaattcgtacggtaaggacga

SEQ ID NO: 128697 - DNA, 25 bp, Homo sapien
tctctcgaatcagtacaaccgggac

SEQ ID NO: 128698 - DNA, 25 bp, Homo sapien
tctctcgaatcactacaaccgggac

SEQ ID NO: 128699 - DNA, 25 bp, Homo sapien
ggttcctccctttctactcagggac

SEQ ID NO: 128700 - DNA, 25 bp, Homo sapien
ggttcctcccttactactcagggac

SEQ ID NO: 128701 - DNA, 25 bp, Homo sapien
ggtaccaccgtcaccgaaggagtca

SEQ ID NO: 128702 - DNA, 25 bp, Homo sapien
ggtaccaccgtctccgaaggagtca

SEQ ID NO: 128703 - DNA, 25 bp, Homo sapien
agagaactagcgtccaagatgtcac

SEQ ID NO: 128704 - DNA, 25 bp, Homo sapien
agagaactagcgaccaagatgtcac

SEQ ID NO: 128705 - DNA, 25 bp, Homo sapien
ggtaaacgagtatccagaaagtctc

SEQ ID NO: 128706 - DNA, 25 bp, Homo sapien
ggtaaacgagtaaccagaaagtctc

SEQ ID NO: 128707 - DNA, 25 bp, Homo sapien
cagggccacttcggacagcaccaac

SEQ ID NO: 128708 - DNA, 25 bp, Homo sapien
cagggccacttccgacagcaccaac

SEQ ID NO: 128709 - DNA, 25 bp, Homo sapien
agagacctttcttagggaacccaac

SEQ ID NO: 128710 - DNA, 25 bp, Homo sapien
agagacctttctaagggaacccaac

SEQ ID NO: 128711 - DNA, 25 bp, Homo sapien
agacaatttgacatgtggcattaac

SEQ ID NO: 128712 - DNA, 25 bp, Homo sapien
agacaatttgacttgtggcattaac

SEQ ID NO: 128713 - DNA, 25 bp, Homo sapien
gaaatggaaccttcggagtaccatc

SEQ ID NO: 128714 - DNA, 25 bp, Homo sapien
gaaatggaacctacggagtaccatc

SEQ ID NO: 128715 - DNA, 25 bp, Homo sapien
gtggactcctgacaagttcacccat

SEQ ID NO: 128716 - DNA, 25 bp, Homo sapien
gtggactcctgagaagttcacccat

SEQ ID NO: 128717 - DNA, 25 bp, Homo sapien
aatattgaagtgaacttaccctccg

SEQ ID NO: 128718 - DNA, 25 bp, Homo sapien
aatattgaagtgtacttaccctccg

SEQ ID NO: 128719 - DNA, 25 bp, Homo sapien
catttgacgaggtagtcgtcccagg

SEQ ID NO: 128720 - DNA, 25 bp, Homo sapien
catttgacgaggaagtcgtcccagg

SEQ ID NO: 128721 - DNA, 25 bp, Homo sapien
ttcagttggaggagtctctccaagt

SEQ ID NO: 128722 - DNA, 25 bp, Homo sapien
ttcagttggaggtgtctctccaagt

SEQ ID NO: 128723 - DNA, 25 bp, Homo sapien
gtttagttggaggttgccccggtac

SEQ ID NO: 128724 - DNA, 25 bp, Homo sapien
gtttagttggagcttgccccggtac

SEQ ID NO: 128725 - DNA, 25 bp, Homo sapien
aatcatcgtgtcaccgtgtcatcta

SEQ ID NO: 128726 - DNA, 25 bp, Homo sapien
aatcatcgtgtctccgtgtcatcta

SEQ ID NO: 128727 - DNA, 25 bp, Homo sapien
atccgacggttctgttcctcctcga

SEQ ID NO: 128728 - DNA, 25 bp, Homo sapien
atccgacggttcagttcctcctcga

SEQ ID NO: 128729 - DNA, 25 bp, Homo sapien
cgcggcgtgacgaccgtgtccatgc

SEQ ID NO: 128730 - DNA, 25 bp, Homo sapien
cgcggcgtgacgtccgtgtccatgc

SEQ ID NO: 128731 - DNA, 25 bp, Homo sapien
gcgacgaggaatagggaccttaccg

SEQ ID NO: 128732 - DNA, 25 bp, Homo sapien
gcgacgaggaattgggaccttaccg

SEQ ID NO: 128733 - DNA, 25 bp, Homo sapien
tgtctcgaaataacgggaccttttc

SEQ ID NO: 128734 - DNA, 25 bp, Homo sapien
tgtctcgaaatatcgggaccttttc

SEQ ID NO: 128735 - DNA, 25 bp, Homo sapien
gtcgtccccgaggaggcctgacttc

SEQ ID NO: 128736 - DNA, 25 bp, Homo sapien
gtcgtccccgagcaggcctgacttc

SEQ ID NO: 128737 - DNA, 25 bp, Homo sapien
cccgttttgtagactctacccaaag

SEQ ID NO: 128738 - DNA, 25 bp, Homo sapien
cccgttttgtagtctctacccaaag

SEQ ID NO: 128739 - DNA, 25 bp, Homo sapien
tcgcgggtgtcactcctcctaggga

SEQ ID NO: 128740 - DNA, 25 bp, Homo sapien
tcgcgggtgtcagtcctcctaggga

SEQ ID NO: 128741 - DNA, 25 bp, Homo sapien
gccatctagagacactcctacaaga

SEQ ID NO: 128742 - DNA, 25 bp, Homo sapien
gccatctagagagactcctacaaga

SEQ ID NO: 128743 - DNA, 25 bp, Homo sapien
ggcatgactaggttcccgataaatc

SEQ ID NO: 128744 - DNA, 25 bp, Homo sapien
ggcatgactaggatcccgataaatc

SEQ ID NO: 128745 - DNA, 25 bp, Homo sapien
ggaatcatggacctaccggagaatg

SEQ ID NO: 128746 - DNA, 25 bp, Homo sapien
ggaatcatggacgtaccggagaatg

SEQ ID NO: 128747 - DNA, 25 bp, Homo sapien
cgaccggtcagtcgagggagaactt

SEQ ID NO: 128748 - DNA, 25 bp, Homo sapien
cgaccggtcagtggagggagaactt

SEQ ID NO: 128749 - DNA, 25 bp, Homo sapien
cgacaggtcagggagacctgtaccc

SEQ ID NO: 128750 - DNA, 25 bp, Homo sapien
cgacaggtcaggcagacctgtaccc

SEQ ID NO: 128751 - DNA, 25 bp, Homo sapien
tagcaggtgcagctagagaagcaga

SEQ ID NO: 128752 - DNA, 25 bp, Homo sapien
tagcaggtgcaggtagagaagcaga

SEQ ID NO: 128753 - DNA, 25 bp, Homo sapien
cccgaggtgccctgacggagatgat

SEQ ID NO: 128754 - DNA, 25 bp, Homo sapien
cccgaggtgcccagacggagatgat

SEQ ID NO: 128755 - DNA, 25 bp, Homo sapien
cgcgcagctcgaacgcgagaaacga

SEQ ID NO: 128756 - DNA, 25 bp, Homo sapien
cgcgcagctcgatcgcgagaaacga

SEQ ID NO: 128757 - DNA, 25 bp, Homo sapien
tcgacgggtcgaccatcggacagtc

SEQ ID NO: 128758 - DNA, 25 bp, Homo sapien
tcgacgggtcgagcatcggacagtc

SEQ ID NO: 128759 - DNA, 25 bp, Homo sapien
gacaggtcttagatcgacggactct

SEQ ID NO: 128760 - DNA, 25 bp, Homo sapien
gacaggtcttagttcgacggactct

SEQ ID NO: 128761 - DNA, 25 bp, Homo sapien
aatcgacatgtcgtcatctaggagg

SEQ ID NO: 128762 - DNA, 25 bp, Homo sapien
aatcgacatgtcctcatctaggagg

SEQ ID NO: 128763 - DNA, 25 bp, Homo sapien
gaatgtgtacctgtccactgtctgg

SEQ ID NO: 128764 - DNA, 25 bp, Homo sapien
gaatgtgtacctctccactgtctgg

SEQ ID NO: 128765 - DNA, 25 bp, Homo sapien
agttggtactcgtacccgagggacg

SEQ ID NO: 128766 - DNA, 25 bp, Homo sapien
agttggtactcgaacccgagggacg

SEQ ID NO: 128767 - DNA, 25 bp, Homo sapien
ggtcctctactcttcctaggggacg

SEQ ID NO: 128768 - DNA, 25 bp, Homo sapien
ggtcctctactcatcctaggggacg

SEQ ID NO: 128769 - DNA, 25 bp, Homo sapien
tccgggtccccaggtctcaaggacg

SEQ ID NO: 128770 - DNA, 25 bp, Homo sapien
tccgggtccccacgtctcaaggacg

SEQ ID NO: 128771 - DNA, 25 bp, Homo sapien
cgtccgtccgtccggcttccggagg

SEQ ID NO: 128772 - DNA, 25 bp, Homo sapien
cgtccgtccgtcgggcttccggagg

SEQ ID NO: 128773 - DNA, 25 bp, Homo sapien
cgtcggcccgcacgtgtaggaacta

SEQ ID NO: 128774 - DNA, 25 bp, Homo sapien
cgtcggcccgcaggtgtaggaacta

SEQ ID NO: 128775 - DNA, 25 bp, Homo sapien
acggtctacccttagttataacatg

SEQ ID NO: 128776 - DNA, 25 bp, Homo sapien
acggtctaccctaagttataacatg

SEQ ID NO: 128777 - DNA, 25 bp, Homo sapien
tcctcggtccccaagtaagtaccaa

SEQ ID NO: 128778 - DNA, 25 bp, Homo sapien
tcctcggtcccctagtaagtaccaa

SEQ ID NO: 128779 - DNA, 25 bp, Homo sapien
gacacacccgtttacacgtctctgt

SEQ ID NO: 128780 - DNA, 25 bp, Homo sapien
gacacacccgttaacacgtctctgt

SEQ ID NO: 128781 - DNA, 25 bp, Homo sapien
gcacggacgacctctatatcctttt

SEQ ID NO: 128782 - DNA, 25 bp, Homo sapien
gcacggacgaccactatatcctttt

SEQ ID NO: 128783 - DNA, 25 bp, Homo sapien
gtcgatgtacccacaagtccgtttc

SEQ ID NO: 128784 - DNA, 25 bp, Homo sapien
gtcgatgtaccctcaagtccgtttc

SEQ ID NO: 128785 - DNA, 25 bp, Homo sapien
tcacatcgctcgtttaagacctttc

SEQ ID NO: 128786 - DNA, 25 bp, Homo sapien
tcacatcgctcgattaagacctttc

SEQ ID NO: 128787 - DNA, 25 bp, Homo sapien
gactattcctcatgtaccaggtttc

SEQ ID NO: 128788 - DNA, 25 bp, Homo sapien
gactattcctcaagtaccaggtttc

SEQ ID NO: 128789 - DNA, 25 bp, Homo sapien
ccatcggacgggaccgtgctctacg

SEQ ID NO: 128790 - DNA, 25 bp, Homo sapien
ccatcggacgggtccgtgctctacg

SEQ ID NO: 128791 - DNA, 25 bp, Homo sapien
ccatcaagggtatgaggactcgtag

SEQ ID NO: 128792 - DNA, 25 bp, Homo sapien
ccatcaagggtaagaggactcgtag

SEQ ID NO: 128793 - DNA, 25 bp, Homo sapien
cgtgaagagagtagacgatcgtcag

SEQ ID NO: 128794 - DNA, 25 bp, Homo sapien
cgtgaagagagttgacgatcgtcag

SEQ ID NO: 128795 - DNA, 25 bp, Homo sapien
tgaactttttaatgtggaccgtcga

SEQ ID NO: 128796 - DNA, 25 bp, Homo sapien
tgaactttttaaagtggaccgtcga

SEQ ID NO: 128797 - DNA, 25 bp, Homo sapien
tataagactttttatgtcggggtcc

SEQ ID NO: 128798 - DNA, 25 bp, Homo sapien
tataagacttttaatgtcggggtcc

SEQ ID NO: 128799 - DNA, 25 bp, Homo sapien
agaacgacctttagagccggcggtc

SEQ ID NO: 128800 - DNA, 25 bp, Homo sapien
agaacgaccttttgagccggcggtc

SEQ ID NO: 128801 - DNA, 25 bp, Homo sapien
cccttgtcggtacgaggtacggtgt

SEQ ID NO: 128802 - DNA, 25 bp, Homo sapien
cccttgtcggtaggaggtacggtgt

SEQ ID NO: 128803 - DNA, 25 bp, Homo sapien
ggtactcttacttttaggtacatgt

SEQ ID NO: 128804 - DNA, 25 bp, Homo sapien
ggtactcttactattaggtacatgt

SEQ ID NO: 128805 - DNA, 25 bp, Homo sapien
gtgtctcggtgaacagtgagtcttg

SEQ ID NO: 128806 - DNA, 25 bp, Homo sapien
gtgtctcggtgatcagtgagtcttg

SEQ ID NO: 128807 - DNA, 25 bp, Homo sapien
gagacaccgtcgacgtggagtgtaa

SEQ ID NO: 128808 - DNA, 25 bp, Homo sapien
gagacaccgtcgtcgtggagtgtaa

SEQ ID NO: 128809 - DNA, 25 bp, Homo sapien
acgaaagaaacattcgtaccaagta

SEQ ID NO: 128810 - DNA, 25 bp, Homo sapien
acgaaagaaacaatcgtaccaagta

SEQ ID NO: 128811 - DNA, 25 bp, Homo sapien
agtccagcagaagacccacacacaa

SEQ ID NO: 128812 - DNA, 25 bp, Homo sapien
agtccagcagaacacccacacacaa

SEQ ID NO: 128813 - DNA, 25 bp, Homo sapien
ggcaggacgtataccgacattgaaa

SEQ ID NO: 128814 - DNA, 25 bp, Homo sapien
ggcaggacgtattccgacattgaaa

SEQ ID NO: 128815 - DNA, 25 bp, Homo sapien
gggaagaggaccttattctccgaac

SEQ ID NO: 128816 - DNA, 25 bp, Homo sapien
gggaagaggaccatattctccgaac

SEQ ID NO: 128817 - DNA, 25 bp, Homo sapien
gactgcaagtcacatttctccactg

SEQ ID NO: 128818 - DNA, 25 bp, Homo sapien
gactgcaagtcagatttctccactg

SEQ ID NO: 128819 - DNA, 25 bp, Homo sapien
gtgatgtaccagtaaaatttccctt

SEQ ID NO: 128820 - DNA, 25 bp, Homo sapien
gtgatgtaccagaaaaatttccctt

SEQ ID NO: 128821 - DNA, 25 bp, Homo sapien
tgtatgaaagaactgccttcccgtt

SEQ ID NO: 128822 - DNA, 25 bp, Homo sapien
tgtatgaaagaagtgccttcccgtt

SEQ ID NO: 128823 - DNA, 25 bp, Homo sapien
gaagatctatataatctcaactggt

SEQ ID NO: 128824 - DNA, 25 bp, Homo sapien
gaagatctatattatctcaactggt

SEQ ID NO: 128825 - DNA, 25 bp, Homo sapien
ggcgtgtcctatgaagacatcagcg

SEQ ID NO: 128826 - DNA, 25 bp, Homo sapien
ggcgtgtcctatcaagacatcagcg

SEQ ID NO: 128827 - DNA, 25 bp, Homo sapien
gaggtgtcagaccagaagaacactc

SEQ ID NO: 128828 - DNA, 25 bp, Homo sapien
gaggtgtcagacgagaagaacactc

SEQ ID NO: 128829 - DNA, 25 bp, Homo sapien
aaagatgttttggtaacgacaccga

SEQ ID NO: 128830 - DNA, 25 bp, Homo sapien
aaagatgttttgctaacgacaccga

SEQ ID NO: 128831 - DNA, 25 bp, Homo sapien
aataatgtgtttcttgaacgacgac

SEQ ID NO: 128832 - DNA, 25 bp, Homo sapien
aataatgtgtttgttgaacgacgac

SEQ ID NO: 128833 - DNA, 25 bp, Homo sapien
taaatctaaatttgtgacgaccaga

SEQ ID NO: 128834 - DNA, 25 bp, Homo sapien
taaatctaaattagtgacgaccaga

SEQ ID NO: 128835 - DNA, 25 bp, Homo sapien
tgtcttgtagcctgtatgaacaaga

SEQ ID NO: 128836 - DNA, 25 bp, Homo sapien
tgtcttgtagccagtatgaacaaga

SEQ ID NO: 128837 - DNA, 25 bp, Homo sapien
tccttcggctacatgaagtaccgat

SEQ ID NO: 128838 - DNA, 25 bp, Homo sapien
tccttcggctacttgaagtaccgat

SEQ ID NO: 128839 - DNA, 25 bp, Homo sapien
acatcttgtcgatctcttgtcatcg

SEQ ID NO: 128840 - DNA, 25 bp, Homo sapien
acatcttgtcgaactcttgtcatcg

SEQ ID NO: 128841 - DNA, 25 bp, Homo sapien
agtcccgtgtggactctgtgtcatc

SEQ ID NO: 128842 - DNA, 25 bp, Homo sapien
agtcccgtgtggtctctgtgtcatc

SEQ ID NO: 128843 - DNA, 25 bp, Homo sapien
tcgcgcatgtggtgtaggtaccgac

SEQ ID NO: 128844 - DNA, 25 bp, Homo sapien
tcgcgcatgtggagtaggtaccgac

SEQ ID NO: 128845 - DNA, 25 bp, Homo sapien
gacctcacactttcgggtgatcgga

SEQ ID NO: 128846 - DNA, 25 bp, Homo sapien
gacctcacacttacgggtgatcgga

SEQ ID NO: 128847 - DNA, 25 bp, Homo sapien
ccaacactagtcgaggttgactcct

SEQ ID NO: 128848 - DNA, 25 bp, Homo sapien
ccaacactagtccaggttgactcct

SEQ ID NO: 128849 - DNA, 25 bp, Homo sapien
aaccggtgtactcaggtgtgtcacc

SEQ ID NO: 128850 - DNA, 25 bp, Homo sapien
aaccggtgtactgaggtgtgtcacc

SEQ ID NO: 128851 - DNA, 25 bp, Homo sapien
atcgatcactactaagtcagtttcg

SEQ ID NO: 128852 - DNA, 25 bp, Homo sapien
atcgatcactacaaagtcagtttcg

SEQ ID NO: 128853 - DNA, 25 bp, Homo sapien
gaaaacctacgaagagcctccgctc

SEQ ID NO: 128854 - DNA, 25 bp, Homo sapien
gaaaacctacgatgagcctccgctc

SEQ ID NO: 128855 - DNA, 25 bp, Homo sapien
tggatcacatatgaccccttacgtc

SEQ ID NO: 128856 - DNA, 25 bp, Homo sapien
tggatcacatatcaccccttacgtc

SEQ ID NO: 128857 - DNA, 25 bp, Homo sapien
gtgagagtacccatcagggagaatc

SEQ ID NO: 128858 - DNA, 25 bp, Homo sapien
gtgagagtacccttcagggagaatc

SEQ ID NO: 128859 - DNA, 25 bp, Homo sapien
gacaccggagtcgggtctgagtgta

SEQ ID NO: 128860 - DNA, 25 bp, Homo sapien
gacaccggagtccggtctgagtgta

SEQ ID NO: 128861 - DNA, 25 bp, Homo sapien
ttttctgtctttcaggatacgttca

SEQ ID NO: 128862 - DNA, 25 bp, Homo sapien
ttttctgtctttgaggatacgttca

SEQ ID NO: 128863 - DNA, 25 bp, Homo sapien
tcttcgttttattggcactgataga

SEQ ID NO: 128864 - DNA, 25 bp, Homo sapien
tcttcgttttataggcactgataga

SEQ ID NO: 128865 - DNA, 25 bp, Homo sapien
caccgtcggctcgagaccctgatta

SEQ ID NO: 128866 - DNA, 25 bp, Homo sapien
caccgtcggctccagaccctgatta

SEQ ID NO: 128867 - DNA, 25 bp, Homo sapien
cgtagacacctaaatccatatgagt

SEQ ID NO: 128868 - DNA, 25 bp, Homo sapien
cgtagacacctatatccatatgagt

SEQ ID NO: 128869 - DNA, 25 bp, Homo sapien
tagacgacacgtcagtcccctcttt

SEQ ID NO: 128870 - DNA, 25 bp, Homo sapien
tagacgacacgtgagtcccctcttt

SEQ ID NO: 128871 - DNA, 25 bp, Homo sapien
ttcaagtgtcttgtgcgaccccact

SEQ ID NO: 128872 - DNA, 25 bp, Homo sapien
ttcaagtgtcttctgcgaccccact

SEQ ID NO: 128873 - DNA, 25 bp, Homo sapien
tgaggtacctgtctgtgatcaccac

SEQ ID NO: 128874 - DNA, 25 bp, Homo sapien
tgaggtacctgtgtgtgatcaccac

SEQ ID NO: 128875 - DNA, 25 bp, Homo sapien
agggatctcgtttcgtcaaccatac

SEQ ID NO: 128876 - DNA, 25 bp, Homo sapien
agggatctcgttacgtcaaccatac

SEQ ID NO: 128877 - DNA, 25 bp, Homo sapien
cacgcgcaaccgtcggtggatcagg

SEQ ID NO: 128878 - DNA, 25 bp, Homo sapien
cacgcgcaaccgacggtggatcagg

SEQ ID NO: 128879 - DNA, 25 bp, Homo sapien
aacacaaccgatgtcggagacaggt

SEQ ID NO: 128880 - DNA, 25 bp, Homo sapien
aacacaaccgatctcggagacaggt

SEQ ID NO: 128881 - DNA, 25 bp, Homo sapien
gtaaatatacattcaccagataggg

SEQ ID NO: 128882 - DNA, 25 bp, Homo sapien
gtaaatatacatacaccagataggg

SEQ ID NO: 128883 - DNA, 25 bp, Homo sapien
ttaggtataacgtttaccaagaaca

SEQ ID NO: 128884 - DNA, 25 bp, Homo sapien
ttaggtataacgattaccaagaaca

SEQ ID NO: 128885 - DNA, 25 bp, Homo sapien
gtggaaaggtttattcccagagaca

SEQ ID NO: 128886 - DNA, 25 bp, Homo sapien
gtggaaaggttttttcccagagaca

SEQ ID NO: 128887 - DNA, 25 bp, Homo sapien
gggtggacttttacttccttgacca

SEQ ID NO: 128888 - DNA, 25 bp, Homo sapien
gggtggactttttcttccttgacca

SEQ ID NO: 128889 - DNA, 25 bp, Homo sapien
gttctttatgccatcactgtgaaat

SEQ ID NO: 128890 - DNA, 25 bp, Homo sapien
gttctttatgccttcactgtgaaat

SEQ ID NO: 128891 - DNA, 25 bp, Homo sapien
ttttaagatgtaccacgtagaaacc

SEQ ID NO: 128892 - DNA, 25 bp, Homo sapien
ttttaagatgtagcacgtagaaacc

SEQ ID NO: 128893 - DNA, 25 bp, Homo sapien
gttgtttctattggtgtacaaactc

SEQ ID NO: 128894 - DNA, 25 bp, Homo sapien
gttgtttctattcgtgtacaaactc

SEQ ID NO: 128895 - DNA, 25 bp, Homo sapien
atctttaaagttttcgcagagacgc

SEQ ID NO: 128896 - DNA, 25 bp, Homo sapien
atctttaaagttatcgcagagacgc

SEQ ID NO: 128897 - DNA, 25 bp, Homo sapien
acgactggtaaataaccctgaactg

SEQ ID NO: 128898 - DNA, 25 bp, Homo sapien
acgactggtaaaaaaccctgaactg

SEQ ID NO: 128899 - DNA, 25 bp, Homo sapien
tttccatgttaaacgccgtgaacac

SEQ ID NO: 128900 - DNA, 25 bp, Homo sapien
tttccatgttaatcgccgtgaacac

SEQ ID NO: 128901 - DNA, 25 bp, Homo sapien
tttaccatgtctttcccgttgtccg

SEQ ID NO: 128902 - DNA, 25 bp, Homo sapien
tttaccatgtctatcccgttgtccg

SEQ ID NO: 128903 - DNA, 25 bp, Homo sapien
tgtccttacacagacctctggtcgt

SEQ ID NO: 128904 - DNA, 25 bp, Homo sapien
tgtccttacacacacctctggtcgt

SEQ ID NO: 128905 - DNA, 25 bp, Homo sapien
ggatctcgtttcgtcaaccatacct

SEQ ID NO: 128906 - DNA, 25 bp, Homo sapien
ggatctcgtttcctcaaccatacct

SEQ ID NO: 128907 - DNA, 25 bp, Homo sapien
gaatctgttgtgtctagactttacc

SEQ ID NO: 128908 - DNA, 25 bp, Homo sapien
gaatctgttgtgactagactttacc

SEQ ID NO: 128909 - DNA, 25 bp, Homo sapien
agacgtgttaggtaactatcttgac

SEQ ID NO: 128910 - DNA, 25 bp, Homo sapien
agacgtgttaggaaactatcttgac

SEQ ID NO: 128911 - DNA, 25 bp, Homo sapien
tgtatgtttcaaacgattgacacgt

SEQ ID NO: 128912 - DNA, 25 bp, Homo sapien
tgtatgtttcaatcgattgacacgt

SEQ ID NO: 128913 - DNA, 25 bp, Homo sapien
aaggtatgtgcaattgctgcgtacg

SEQ ID NO: 128914 - DNA, 25 bp, Homo sapien
aaggtatgtgcatttgctgcgtacg

SEQ ID NO: 128915 - DNA, 25 bp, Homo sapien
ctctgtactccctgtatttacccgg

SEQ ID NO: 128916 - DNA, 25 bp, Homo sapien
ctctgtactcccagtatttacccgg

SEQ ID NO: 128917 - DNA, 25 bp, Homo sapien
ctgttttcctccttacgtacagttg

SEQ ID NO: 128918 - DNA, 25 bp, Homo sapien
ctgttttcctccatacgtacagttg

SEQ ID NO: 128919 - DNA, 25 bp, Homo sapien
ttgatactctcgtagtacacgtgct

SEQ ID NO: 128920 - DNA, 25 bp, Homo sapien
ttgatactctcgaagtacacgtgct

SEQ ID NO: 128921 - DNA, 25 bp, Homo sapien
ccatacgttgatggaactctgtgct

SEQ ID NO: 128922 - DNA, 25 bp, Homo sapien
ccatacgttgatcgaactctgtgct

SEQ ID NO: 128923 - DNA, 25 bp, Homo sapien
acaggacgtgatacgactccttctt

SEQ ID NO: 128924 - DNA, 25 bp, Homo sapien
acaggacgtgattcgactccttctt

SEQ ID NO: 128925 - DNA, 25 bp, Homo sapien
gttagacactcgattcctatttgtt

SEQ ID NO: 128926 - DNA, 25 bp, Homo sapien
gttagacactcgtttcctatttgtt

SEQ ID NO: 128927 - DNA, 25 bp, Homo sapien
agtcaatagttcgagtgtactcaat

SEQ ID NO: 128928 - DNA, 25 bp, Homo sapien
agtcaatagttccagtgtactcaat

SEQ ID NO: 128929 - DNA, 25 bp, Homo sapien
gtgatcgacatcgtcctgttatttt

SEQ ID NO: 128930 - DNA, 25 bp, Homo sapien
gtgatcgacatcctcctgttatttt

SEQ ID NO: 128931 - DNA, 25 bp, Homo sapien
gtctcttgtttctgactggtaatta

SEQ ID NO: 128932 - DNA, 25 bp, Homo sapien
gtctcttgtttcagactggtaatta

SEQ ID NO: 128933 - DNA, 25 bp, Homo sapien
agacattagtcgcaaactaaatttt

SEQ ID NO: 128934 - DNA, 25 bp, Homo sapien
agacattagtcggaaactaaatttt

SEQ ID NO: 128935 - DNA, 25 bp, Homo sapien
ttcatgagtcccatcgttcattgtt

SEQ ID NO: 128936 - DNA, 25 bp, Homo sapien
ttcatgagtcccttcgttcattgtt

SEQ ID NO: 128937 - DNA, 25 bp, Homo sapien
cgattattcactaccgtcactctgg

SEQ ID NO: 128938 - DNA, 25 bp, Homo sapien
cgattattcacttccgtcactctgg

SEQ ID NO: 128939 - DNA, 25 bp, Homo sapien
accctcttttcggtatctaattatg

SEQ ID NO: 128940 - DNA, 25 bp, Homo sapien
accctcttttcgctatctaattatg

SEQ ID NO: 128941 - DNA, 25 bp, Homo sapien
tagaccctttgttctgtaaatttct

SEQ ID NO: 128942 - DNA, 25 bp, Homo sapien
tagaccctttgtactgtaaatttct

SEQ ID NO: 128943 - DNA, 25 bp, Homo sapien
ttcccgttctcgatcggttaatttt

SEQ ID NO: 128944 - DNA, 25 bp, Homo sapien
ttcccgttctcgttcggttaatttt

SEQ ID NO: 128945 - DNA, 25 bp, Homo sapien
caccgttcatgaggtgtcagttatt

SEQ ID NO: 128946 - DNA, 25 bp, Homo sapien
caccgttcatgacgtgtcagttatt

SEQ ID NO: 128947 - DNA, 25 bp, Homo sapien
atagcctactcaaaggcggcgagca

SEQ ID NO: 128948 - DNA, 25 bp, Homo sapien
atagcctactcataggcggcgagca

SEQ ID NO: 128949 - DNA, 25 bp, Homo sapien
ccgacactgcatagcctactcaaag

SEQ ID NO: 128950 - DNA, 25 bp, Homo sapien
ccgacactgcattgcctactcaaag

SEQ ID NO: 128951 - DNA, 25 bp, Homo sapien
atgaagtttgggttacgtctccttt

SEQ ID NO: 128952 - DNA, 25 bp, Homo sapien
atgaagtttgggatacgtctccttt

SEQ ID NO: 128953 - DNA, 25 bp, Homo sapien
atgaagagagtccagttgtccacaa

SEQ ID NO: 128954 - DNA, 25 bp, Homo sapien
atgaagagagtcgagttgtccacaa

SEQ ID NO: 128955 - DNA, 25 bp, Homo sapien
gaggacaaagggtacccaagactag

SEQ ID NO: 128956 - DNA, 25 bp, Homo sapien
gaggacaaagggaacccaagactag

SEQ ID NO: 128957 - DNA, 25 bp, Homo sapien
cgtccgcacagaacactatttagga

SEQ ID NO: 128958 - DNA, 25 bp, Homo sapien
cgtccgcacagatcactatttagga

SEQ ID NO: 128959 - DNA, 25 bp, Homo sapien
gttattaccactcgttacttaggtc

SEQ ID NO: 128960 - DNA, 25 bp, Homo sapien
gttattaccactggttacttaggtc

SEQ ID NO: 128961 - DNA, 25 bp, Homo sapien
cagagtaccccgttacacaggagtg

SEQ ID NO: 128962 - DNA, 25 bp, Homo sapien
cagagtaccccgatacacaggagtg

SEQ ID NO: 128963 - DNA, 25 bp, Homo sapien
atacagacgtacccaaaaaagatgt

SEQ ID NO: 128964 - DNA, 25 bp, Homo sapien
atacagacgtacgcaaaaaagatgt

SEQ ID NO: 128965 - DNA, 25 bp, Homo sapien
ggggacccgggatctcgatccaact

SEQ ID NO: 128966 - DNA, 25 bp, Homo sapien
ggggacccgggaactcgatccaact

SEQ ID NO: 128967 - DNA, 25 bp, Homo sapien
actcactcgggaggacggtgcagag

SEQ ID NO: 128968 - DNA, 25 bp, Homo sapien
actcactcgggacgacggtgcagag

SEQ ID NO: 128969 - DNA, 25 bp, Homo sapien
gtgaccgtaaagaggcggtgtcaca

SEQ ID NO: 128970 - DNA, 25 bp, Homo sapien
gtgaccgtaaagtggcggtgtcaca

SEQ ID NO: 128971 - DNA, 25 bp, Homo sapien
agcgagtacgtggttccgggccatt

SEQ ID NO: 128972 - DNA, 25 bp, Homo sapien
agcgagtacgtgcttccgggccatt

SEQ ID NO: 128973 - DNA, 25 bp, Homo sapien
cgactcccgtttcaggtcctagagt

SEQ ID NO: 128974 - DNA, 25 bp, Homo sapien
cgactcccgtttgaggtcctagagt

SEQ ID NO: 128975 - DNA, 25 bp, Homo sapien
taacctacctctttggtatcctagg

SEQ ID NO: 128976 - DNA, 25 bp, Homo sapien
taacctacctctatggtatcctagg

SEQ ID NO: 128977 - DNA, 25 bp, Homo sapien
aaaccgtcaagatttatcgttcacg

SEQ ID NO: 128978 - DNA, 25 bp, Homo sapien
aaaccgtcaagaattatcgttcacg

SEQ ID NO: 128979 - DNA, 25 bp, Homo sapien
ttgtaaaccgtcaagagttttttcc

SEQ ID NO: 128980 - DNA, 25 bp, Homo sapien
ttgtaaaccgtctagagttttttcc

SEQ ID NO: 128981 - DNA, 25 bp, Homo sapien
agaacagacgctacgactttggacc

SEQ ID NO: 128982 - DNA, 25 bp, Homo sapien
agaacagacgcttcgactttggacc

SEQ ID NO: 128983 - DNA, 25 bp, Homo sapien
atgagaccagggtcttgttgtctga

SEQ ID NO: 128984 - DNA, 25 bp, Homo sapien
atgagaccagggacttgttgtctga

SEQ ID NO: 128985 - DNA, 25 bp, Homo sapien
tgaggagagcaatccttgtcacaga

SEQ ID NO: 128986 - DNA, 25 bp, Homo sapien
tgaggagagcaaaccttgtcacaga

SEQ ID NO: 128987 - DNA, 25 bp, Homo sapien
taggaactcgaagagctgccacagt

SEQ ID NO: 128988 - DNA, 25 bp, Homo sapien
taggaactcgaacagctgccacagt

SEQ ID NO: 128989 - DNA, 25 bp, Homo sapien
aagaaccggaacgcgtccgcgaagt

SEQ ID NO: 128990 - DNA, 25 bp, Homo sapien
aagaaccggaacccgtccgcgaagt

SEQ ID NO: 128991 - DNA, 25 bp, Homo sapien
gtgacccggagcaacttcgcccagt

SEQ ID NO: 128992 - DNA, 25 bp, Homo sapien
gtgacccggagctacttcgcccagt

SEQ ID NO: 128993 - DNA, 25 bp, Homo sapien
tgcccgagcgaccacttgacacaca

SEQ ID NO: 128994 - DNA, 25 bp, Homo sapien
tgcccgagcgacgacttgacacaca

SEQ ID NO: 128995 - DNA, 25 bp, Homo sapien
tgccggtgacggtagtactcgtccc

SEQ ID NO: 128996 - DNA, 25 bp, Homo sapien
tgccggtgacggaagtactcgtccc

SEQ ID NO: 128997 - DNA, 25 bp, Homo sapien
gtggacggtaaaagttctctccgtt

SEQ ID NO: 128998 - DNA, 25 bp, Homo sapien
gtggacggtaaatgttctctccgtt

SEQ ID NO: 128999 - DNA, 25 bp, Homo sapien
ctcagtaggtagagttcttttactc

SEQ ID NO: 129000 - DNA, 25 bp, Homo sapien
ctcagtaggtagtgttcttttactc

SEQ ID NO: 129001 - DNA, 25 bp, Homo sapien
aactacgggtacagttatcatgtaa

SEQ ID NO: 129002 - DNA, 25 bp, Homo sapien
aactacgggtactgttatcatgtaa

SEQ ID NO: 129003 - DNA, 25 bp, Homo sapien
gtcctaagtgaatgagcattcgtat

SEQ ID NO: 129004 - DNA, 25 bp, Homo sapien
gtcctaagtgaaagagcattcgtat

SEQ ID NO: 129005 - DNA, 25 bp, Homo sapien
ggcctaagtcaaacgacccctgtct

SEQ ID NO: 129006 - DNA, 25 bp, Homo sapien
ggcctaagtcaatcgacccctgtct

SEQ ID NO: 129007 - DNA, 25 bp, Homo sapien
gtgggtagtgacaattctctttgac

SEQ ID NO: 129008 - DNA, 25 bp, Homo sapien
gtgggtagtgactattctctttgac

SEQ ID NO: 129009 - DNA, 25 bp, Homo sapien
cgaggtgtgactcttacgccttgcg

SEQ ID NO: 129010 - DNA, 25 bp, Homo sapien
cgaggtgtgactgttacgccttgcg

SEQ ID NO: 129011 - DNA, 25 bp, Homo sapien
agagtagttcagtggagatgttgtc

SEQ ID NO: 129012 - DNA, 25 bp, Homo sapien
agagtagttcagaggagatgttgtc

SEQ ID NO: 129013 - DNA, 25 bp, Homo sapien
tagttgtgctccagaaatacttagc

SEQ ID NO: 129014 - DNA, 25 bp, Homo sapien
tagttgtgctcctgaaatacttagc

SEQ ID NO: 129015 - DNA, 25 bp, Homo sapien
ttttgtcccgtactcttactaagtg

SEQ ID NO: 129016 - DNA, 25 bp, Homo sapien
ttttgtcccgtagtcttactaagtg

SEQ ID NO: 129017 - DNA, 25 bp, Homo sapien
gggtcctttcgtcgaccttttgttc

SEQ ID NO: 129018 - DNA, 25 bp, Homo sapien
gggtcctttcgtggaccttttgttc

SEQ ID NO: 129019 - DNA, 25 bp, Homo sapien
gtttaagattgtgaaaacggtttct

SEQ ID NO: 129020 - DNA, 25 bp, Homo sapien
gtttaagattgtcaaaacggtttct

SEQ ID NO: 129021 - DNA, 25 bp, Homo sapien
ttaagtttccaacagacgtataagt

SEQ ID NO: 129022 - DNA, 25 bp, Homo sapien
ttaagtttccaagagacgtataagt

SEQ ID NO: 129023 - DNA, 25 bp, Homo sapien
tcaataggtctcgtcgaaagtgaag

SEQ ID NO: 129024 - DNA, 25 bp, Homo sapien
tcaataggtctcctcgaaagtgaag

SEQ ID NO: 129025 - DNA, 25 bp, Homo sapien
gttggtgacaatacggaaacttcag

SEQ ID NO: 129026 - DNA, 25 bp, Homo sapien
gttggtgacaattcggaaacttcag

SEQ ID NO: 129027 - DNA, 25 bp, Homo sapien
tgttctcgtttctcaagactcctag

SEQ ID NO: 129028 - DNA, 25 bp, Homo sapien
tgttctcgtttcacaagactcctag

SEQ ID NO: 129029 - DNA, 25 bp, Homo sapien
taactgaagcgtaaaccaccggtcg

SEQ ID NO: 129030 - DNA, 25 bp, Homo sapien
taactgaagcgttaaccaccggtcg

SEQ ID NO: 129031 - DNA, 25 bp, Homo sapien
tttggtaacctgtttcacacctgac

SEQ ID NO: 129032 - DNA, 25 bp, Homo sapien
tttggtaacctgattcacacctgac

SEQ ID NO: 129033 - DNA, 25 bp, Homo sapien
tggtcctcggacgtacacgaaaccg

SEQ ID NO: 129034 - DNA, 25 bp, Homo sapien
tggtcctcggacctacacgaaaccg

SEQ ID NO: 129035 - DNA, 25 bp, Homo sapien
agtatctgtagaaggtacaacacct

SEQ ID NO: 129036 - DNA, 25 bp, Homo sapien
agtatctgtagatggtacaacacct

SEQ ID NO: 129037 - DNA, 25 bp, Homo sapien
agtttgtcttagtatgaaacacact

SEQ ID NO: 129038 - DNA, 25 bp, Homo sapien
agtttgtcttagaatgaaacacact

SEQ ID NO: 129039 - DNA, 25 bp, Homo sapien
cttttgtgtaaaacgaaaacgacct

SEQ ID NO: 129040 - DNA, 25 bp, Homo sapien
cttttgtgtaaatcgaaaacgacct

SEQ ID NO: 129041 - DNA, 25 bp, Homo sapien
cctcttattgatttcccagagtatt

SEQ ID NO: 129042 - DNA, 25 bp, Homo sapien
cctcttattgatatcccagagtatt

SEQ ID NO: 129043 - DNA, 25 bp, Homo sapien
tcccttttccggtgctaccgattct

SEQ ID NO: 129044 - DNA, 25 bp, Homo sapien
tcccttttccggagctaccgattct

SEQ ID NO: 129045 - DNA, 25 bp, Homo sapien
cgtgtttgaggaagtcactcaggac

SEQ ID NO: 129046 - DNA, 25 bp, Homo sapien
cgtgtttgaggatgtcactcaggac

SEQ ID NO: 129047 - DNA, 25 bp, Homo sapien
caagtttgtcggtctcacttaacag

SEQ ID NO: 129048 - DNA, 25 bp, Homo sapien
caagtttgtcggactcacttaacag

SEQ ID NO: 129049 - DNA, 25 bp, Homo sapien
gactagatgcccactgagtaagatc

SEQ ID NO: 129050 - DNA, 25 bp, Homo sapien
gactagatgccctctgagtaagatc

SEQ ID NO: 129051 - DNA, 25 bp, Homo sapien
gacgtgtgttcatacatagaataca

SEQ ID NO: 129052 - DNA, 25 bp, Homo sapien
gacgtgtgttcaaacatagaataca

SEQ ID NO: 129053 - DNA, 25 bp, Homo sapien
aaaagggaccaaggacaggttctcg

SEQ ID NO: 129054 - DNA, 25 bp, Homo sapien
aaaagggaccaacgacaggttctcg

SEQ ID NO: 129055 - DNA, 25 bp, Homo sapien
tgggacgagacgagacgggtctcac

SEQ ID NO: 129056 - DNA, 25 bp, Homo sapien
tgggacgagacgtgacgggtctcac

SEQ ID NO: 129057 - DNA, 25 bp, Homo sapien
gagcggaccacgtagtgacgcttca

SEQ ID NO: 129058 - DNA, 25 bp, Homo sapien
gagcggaccacgaagtgacgcttca

SEQ ID NO: 129059 - DNA, 25 bp, Homo sapien
cggcgaagacctgtgacgtcgttcc

SEQ ID NO: 129060 - DNA, 25 bp, Homo sapien
cggcgaagacctctgacgtcgttcc

SEQ ID NO: 129061 - DNA, 25 bp, Homo sapien
cgggcggtaccccagcagtgtcccg

SEQ ID NO: 129062 - DNA, 25 bp, Homo sapien
cgggcggtacccgagcagtgtcccg

SEQ ID NO: 129063 - DNA, 25 bp, Homo sapien
ttagggagttttcgaatataacacc

SEQ ID NO: 129064 - DNA, 25 bp, Homo sapien
ttagggagttttggaatataacacc

SEQ ID NO: 129065 - DNA, 25 bp, Homo sapien
tttgggatatgactaccaatctccg

SEQ ID NO: 129066 - DNA, 25 bp, Homo sapien
tttgggatatgagtaccaatctccg

SEQ ID NO: 129067 - DNA, 25 bp, Homo sapien
ttttggtgaatgacacttagcaatc

SEQ ID NO: 129068 - DNA, 25 bp, Homo sapien
ttttggtgaatgtcacttagcaatc

SEQ ID NO: 129069 - DNA, 25 bp, Homo sapien
atttcgaagaactctcacttggaaa

SEQ ID NO: 129070 - DNA, 25 bp, Homo sapien
atttcgaagaacactcacttggaaa

SEQ ID NO: 129071 - DNA, 25 bp, Homo sapien
tacttgagaataaacctttcggaaa

SEQ ID NO: 129072 - DNA, 25 bp, Homo sapien
tacttgagaatatacctttcggaaa

SEQ ID NO: 129073 - DNA, 25 bp, Homo sapien
acgtaattgttctagtacgaatatc

SEQ ID NO: 129074 - DNA, 25 bp, Homo sapien
acgtaattgttcaagtacgaatatc

SEQ ID NO: 129075 - DNA, 25 bp, Homo sapien
tttctcgccacgaccgaggattcga

SEQ ID NO: 129076 - DNA, 25 bp, Homo sapien
tttctcgccacgtccgaggattcga

SEQ ID NO: 129077 - DNA, 25 bp, Homo sapien
attctcactacctcacgaggaatca

SEQ ID NO: 129078 - DNA, 25 bp, Homo sapien
attctcactaccacacgaggaatca

SEQ ID NO: 129079 - DNA, 25 bp, Homo sapien
tgtagaacaatttcaggatacttac

SEQ ID NO: 129080 - DNA, 25 bp, Homo sapien
tgtagaacaattacaggatacttac

SEQ ID NO: 129081 - DNA, 25 bp, Homo sapien
aagttaccgattcgtcaatattacg

SEQ ID NO: 129082 - DNA, 25 bp, Homo sapien
aagttaccgattggtcaatattacg

SEQ ID NO: 129083 - DNA, 25 bp, Homo sapien
ggatactcctaggagtcacttacaa

SEQ ID NO: 129084 - DNA, 25 bp, Homo sapien
ggatactcctagcagtcacttacaa

SEQ ID NO: 129085 - DNA, 25 bp, Homo sapien
gggctgatccaggacctcttcagtc

SEQ ID NO: 129086 - DNA, 25 bp, Homo sapien
gggctgatccagcacctcttcagtc

SEQ ID NO: 129087 - DNA, 25 bp, Homo sapien
tggggtgtatcaaccccggtgagaa

SEQ ID NO: 129088 - DNA, 25 bp, Homo sapien
tggggtgtatcatccccggtgagaa

SEQ ID NO: 129089 - DNA, 25 bp, Homo sapien
gtagatcttcttggacctggtaaga

SEQ ID NO: 129090 - DNA, 25 bp, Homo sapien
gtagatcttcttcgacctggtaaga

SEQ ID NO: 129091 - DNA, 25 bp, Homo sapien
atagttccacttgactcggcgaaga

SEQ ID NO: 129092 - DNA, 25 bp, Homo sapien
atagttccacttcactcggcgaaga

SEQ ID NO: 129093 - DNA, 25 bp, Homo sapien
taacgcatccgctccaggtcgtttt

SEQ ID NO: 129094 - DNA, 25 bp, Homo sapien
taacgcatccgcaccaggtcgtttt

SEQ ID NO: 129095 - DNA, 25 bp, Homo sapien
ttagatccctcctttaagttgtgta

SEQ ID NO: 129096 - DNA, 25 bp, Homo sapien
ttagatccctccattaagttgtgta

SEQ ID NO: 129097 - DNA, 25 bp, Homo sapien
caggaagtgccgtcgtaactcttaa

SEQ ID NO: 129098 - DNA, 25 bp, Homo sapien
caggaagtgccgacgtaactcttaa

SEQ ID NO: 129099 - DNA, 25 bp, Homo sapien
caagaaaagacgacaactctgaagt

SEQ ID NO: 129100 - DNA, 25 bp, Homo sapien
caagaaaagacgtcaactctgaagt

SEQ ID NO: 129101 - DNA, 25 bp, Homo sapien
taagagaaacggtctaggtccggat

SEQ ID NO: 129102 - DNA, 25 bp, Homo sapien
taagagaaacggactaggtccggat

SEQ ID NO: 129103 - DNA, 25 bp, Homo sapien
taataacggagaagttgtaatccca

SEQ ID NO: 129104 - DNA, 25 bp, Homo sapien
taataacggagatgttgtaatccca

SEQ ID NO: 129105 - DNA, 25 bp, Homo sapien
tcagtggtggagttaaactaaacca

SEQ ID NO: 129106 - DNA, 25 bp, Homo sapien
tcagtggtggagataaactaaacca

SEQ ID NO: 129107 - DNA, 25 bp, Homo sapien
tgcaggtgcggtagatttcgatgac

SEQ ID NO: 129108 - DNA, 25 bp, Homo sapien
tgcaggtgcggttgatttcgatgac

SEQ ID NO: 129109 - DNA, 25 bp, Homo sapien
cggtatttatgaacgtcactaagag

SEQ ID NO: 129110 - DNA, 25 bp, Homo sapien
cggtatttatgatcgtcactaagag

SEQ ID NO: 129111 - DNA, 25 bp, Homo sapien
gggtcgtctttgtcgtccagagtcg

SEQ ID NO: 129112 - DNA, 25 bp, Homo sapien
gggtcgtctttgacgtccagagtcg

SEQ ID NO: 129113 - DNA, 25 bp, Homo sapien
tgaagtctctttttagggtctactg

SEQ ID NO: 129114 - DNA, 25 bp, Homo sapien
tgaagtctctttatagggtctactg

SEQ ID NO: 129115 - DNA, 25 bp, Homo sapien
ccatctctatcttcttggcgtcggt

SEQ ID NO: 129116 - DNA, 25 bp, Homo sapien
ccatctctatctacttggcgtcggt

SEQ ID NO: 129117 - DNA, 25 bp, Homo sapien
tacgtcctagtctcacctgtgcgcg

SEQ ID NO: 129118 - DNA, 25 bp, Homo sapien
tacgtcctagtcacacctgtgcgcg

SEQ ID NO: 129119 - DNA, 25 bp, Homo sapien
ctgccactcgacactctgacgaggt

SEQ ID NO: 129120 - DNA, 25 bp, Homo sapien
ctgccactcgactctctgacgaggt

SEQ ID NO: 129121 - DNA, 25 bp, Homo sapien
tgacggagtaggttcccgacgtcga

SEQ ID NO: 129122 - DNA, 25 bp, Homo sapien
tgacggagtaggatcccgacgtcga

SEQ ID NO: 129123 - DNA, 25 bp, Homo sapien
acgtggaacgaaaggtatggtccga

SEQ ID NO: 129124 - DNA, 25 bp, Homo sapien
acgtggaacgaatggtatggtccga

SEQ ID NO: 129125 - DNA, 25 bp, Homo sapien
tcggactatcagtgtaacctccagt

SEQ ID NO: 129126 - DNA, 25 bp, Homo sapien
tcggactatcagagtaacctccagt

SEQ ID NO: 129127 - DNA, 25 bp, Homo sapien
ccacggtcgcctgaagaaagatccc

SEQ ID NO: 129128 - DNA, 25 bp, Homo sapien
ccacggtcgcctcaagaaagatccc

SEQ ID NO: 129129 - DNA, 25 bp, Homo sapien
cgaaccgttttggagtatttttgtc

SEQ ID NO: 129130 - DNA, 25 bp, Homo sapien
cgaaccgttttgcagtatttttgtc

SEQ ID NO: 129131 - DNA, 25 bp, Homo sapien
gcggtaaccggtacaacatcattcg

SEQ ID NO: 129132 - DNA, 25 bp, Homo sapien
gcggtaaccggttcaacatcattcg

SEQ ID NO: 129133 - DNA, 25 bp, Homo sapien
aaccgaacactaacgactctactta

SEQ ID NO: 129134 - DNA, 25 bp, Homo sapien
aaccgaacactatcgactctactta

SEQ ID NO: 129135 - DNA, 25 bp, Homo sapien
gacctcaaccgttagtatcgtcaca

SEQ ID NO: 129136 - DNA, 25 bp, Homo sapien
gacctcaaccgtaagtatcgtcaca

SEQ ID NO: 129137 - DNA, 25 bp, Homo sapien
ggggacgtgaagagactcgtctcta

SEQ ID NO: 129138 - DNA, 25 bp, Homo sapien
ggggacgtgaagtgactcgtctcta

SEQ ID NO: 129139 - DNA, 25 bp, Homo sapien
ccactctgagtagtcctcccggttg

SEQ ID NO: 129140 - DNA, 25 bp, Homo sapien
ccactctgagtactcctcccggttg

SEQ ID NO: 129141 - DNA, 25 bp, Homo sapien
cccccaagaacttctgttagacatg

SEQ ID NO: 129142 - DNA, 25 bp, Homo sapien
cccccaagaactactgttagacatg

SEQ ID NO: 129143 - DNA, 25 bp, Homo sapien
ggcgccggccactttctcggccaag

SEQ ID NO: 129144 - DNA, 25 bp, Homo sapien
ggcgccggccacattctcggccaag

SEQ ID NO: 129145 - DNA, 25 bp, Homo sapien
gcgtgcaacccctttcaaacgacga

SEQ ID NO: 129146 - DNA, 25 bp, Homo sapien
gcgtgcaaccccattcaaacgacga

SEQ ID NO: 129147 - DNA, 25 bp, Homo sapien
acgtacaacttacttgtcttaggga

SEQ ID NO: 129148 - DNA, 25 bp, Homo sapien
acgtacaacttagttgtcttaggga

SEQ ID NO: 129149 - DNA, 25 bp, Homo sapien
gcagagaaggaggtttgtttcaacc

SEQ ID NO: 129150 - DNA, 25 bp, Homo sapien
gcagagaaggagctttgtttcaacc

SEQ ID NO: 129151 - DNA, 25 bp, Homo sapien
atgaggacttagatcaactacatca

SEQ ID NO: 129152 - DNA, 25 bp, Homo sapien
atgaggacttagttcaactacatca

SEQ ID NO: 129153 - DNA, 25 bp, Homo sapien
ggcttcagacaatcagttcattact

SEQ ID NO: 129154 - DNA, 25 bp, Homo sapien
ggcttcagacaaacagttcattact

SEQ ID NO: 129155 - DNA, 25 bp, Homo sapien
gaaaatctccaataaggttcttctc

SEQ ID NO: 129156 - DNA, 25 bp, Homo sapien
gaaaatctccaaaaaggttcttctc

SEQ ID NO: 129157 - DNA, 25 bp, Homo sapien
ggaaatacatatcatcacttttttc

SEQ ID NO: 129158 - DNA, 25 bp, Homo sapien
ggaaatacatatgatcacttttttc

SEQ ID NO: 129159 - DNA, 25 bp, Homo sapien
aattaactaccgtgaatgtcttgac

SEQ ID NO: 129160 - DNA, 25 bp, Homo sapien
aattaactaccgagaatgtcttgac

SEQ ID NO: 129161 - DNA, 25 bp, Homo sapien
ggattatctttgcacactgtcctaa

SEQ ID NO: 129162 - DNA, 25 bp, Homo sapien
ggattatctttggacactgtcctaa

SEQ ID NO: 129163 - DNA, 25 bp, Homo sapien
ccctgagcttgtgaactacgttgaa

SEQ ID NO: 129164 - DNA, 25 bp, Homo sapien
ccctgagcttgtcaactacgttgaa

SEQ ID NO: 129165 - DNA, 25 bp, Homo sapien
ctgagacccaacatcgcgagacacg

SEQ ID NO: 129166 - DNA, 25 bp, Homo sapien
ctgagacccaacttcgcgagacacg

SEQ ID NO: 129167 - DNA, 25 bp, Homo sapien
tccgaacactcacctcaggacgttg

SEQ ID NO: 129168 - DNA, 25 bp, Homo sapien
tccgaacactcagctcaggacgttg

SEQ ID NO: 129169 - DNA, 25 bp, Homo sapien
gtccaactacgaaggtctgctcctc

SEQ ID NO: 129170 - DNA, 25 bp, Homo sapien
gtccaactacgatggtctgctcctc

SEQ ID NO: 129171 - DNA, 25 bp, Homo sapien
cagcgcgtgggtttccgttcctccc

SEQ ID NO: 129172 - DNA, 25 bp, Homo sapien
cagcgcgtgggtatccgttcctccc

SEQ ID NO: 129173 - DNA, 25 bp, Homo sapien
ctagacttcgggacccgaatgaaag

SEQ ID NO: 129174 - DNA, 25 bp, Homo sapien
ctagacttcgggtcccgaatgaaag

SEQ ID NO: 129175 - DNA, 25 bp, Homo sapien
aggcgcgtctcctttcaacagaaag

SEQ ID NO: 129176 - DNA, 25 bp, Homo sapien
aggcgcgtctccattcaacagaaag

SEQ ID NO: 129177 - DNA, 25 bp, Homo sapien
aagtgtaccttaggattttccaagc

SEQ ID NO: 129178 - DNA, 25 bp, Homo sapien
aagtgtaccttacgattttccaagc

SEQ ID NO: 129179 - DNA, 25 bp, Homo sapien
ggtctttaccttaacgttccatatt

SEQ ID NO: 129180 - DNA, 25 bp, Homo sapien
ggtctttacctttacgttccatatt

SEQ ID NO: 129181 - DNA, 25 bp, Homo sapien
tacaggaccctcaactagtgaaggt

SEQ ID NO: 129182 - DNA, 25 bp, Homo sapien
tacaggaccctctactagtgaaggt

SEQ ID NO: 129183 - DNA, 25 bp, Homo sapien
ttaagagtccggtcctaggacacag

SEQ ID NO: 129184 - DNA, 25 bp, Homo sapien
ttaagagtccggacctaggacacag

SEQ ID NO: 129185 - DNA, 25 bp, Homo sapien
agtaaacttacgagttcaaagtacc

SEQ ID NO: 129186 - DNA, 25 bp, Homo sapien
agtaaacttacgtgttcaaagtacc

SEQ ID NO: 129187 - DNA, 25 bp, Homo sapien
gactgagggtcgtctgacaagataa

SEQ ID NO: 129188 - DNA, 25 bp, Homo sapien
gactgagggtcgactgacaagataa

SEQ ID NO: 129189 - DNA, 25 bp, Homo sapien
aggtgggctaggacctctcgacact

SEQ ID NO: 129190 - DNA, 25 bp, Homo sapien
aggtgggctaggtcctctcgacact

SEQ ID NO: 129191 - DNA, 25 bp, Homo sapien
agacggtcggaaggatccttagcac

SEQ ID NO: 129192 - DNA, 25 bp, Homo sapien
agacggtcggaacgatccttagcac

SEQ ID NO: 129193 - DNA, 25 bp, Homo sapien
acgggaccgacatgtcgtcgcgcat

SEQ ID NO: 129194 - DNA, 25 bp, Homo sapien
acgggaccgacaagtcgtcgcgcat

SEQ ID NO: 129195 - DNA, 25 bp, Homo sapien
cgtacgacaaccataccgctgcctg

SEQ ID NO: 129196 - DNA, 25 bp, Homo sapien
cgtacgacaaccttaccgctgcctg

SEQ ID NO: 129197 - DNA, 25 bp, Homo sapien
gcgtccagacctctcgtcgggtcga

SEQ ID NO: 129198 - DNA, 25 bp, Homo sapien
gcgtccagacctgtcgtcgggtcga

SEQ ID NO: 129199 - DNA, 25 bp, Homo sapien
ctttgtttgtcaagactctggcaag

SEQ ID NO: 129200 - DNA, 25 bp, Homo sapien
ctttgtttgtcatgactctggcaag

SEQ ID NO: 129201 - DNA, 25 bp, Homo sapien
gacttgttttggtcgagttgttcca

SEQ ID NO: 129202 - DNA, 25 bp, Homo sapien
gacttgttttggacgagttgttcca

SEQ ID NO: 129203 - DNA, 25 bp, Homo sapien
gcgtcagcagcgtcgggctccagca

SEQ ID NO: 129204 - DNA, 25 bp, Homo sapien
gcgtcagcagcgacgggctccagca

SEQ ID NO: 129205 - DNA, 25 bp, Homo sapien
tcagcacggagagtgtcccgagtcc

SEQ ID NO: 129206 - DNA, 25 bp, Homo sapien
tcagcacggagactgtcccgagtcc

SEQ ID NO: 129207 - DNA, 25 bp, Homo sapien
caacccgacgagtgtcccgagacga

SEQ ID NO: 129208 - DNA, 25 bp, Homo sapien
caacccgacgagagtcccgagacga

SEQ ID NO: 129209 - DNA, 25 bp, Homo sapien
ctcgaagagactccagacaagtggg

SEQ ID NO: 129210 - DNA, 25 bp, Homo sapien
ctcgaagagactgcagacaagtggg

SEQ ID NO: 129211 - DNA, 25 bp, Homo sapien
cttgagaggtacgtcaagacgagtt

SEQ ID NO: 129212 - DNA, 25 bp, Homo sapien
cttgagaggtacctcaagacgagtt

SEQ ID NO: 129213 - DNA, 25 bp, Homo sapien
taaacttctggacagcggagtactt

SEQ ID NO: 129214 - DNA, 25 bp, Homo sapien
taaacttctggagagcggagtactt

SEQ ID NO: 129215 - DNA, 25 bp, Homo sapien
aggaaaagtaggacatcacgtcatg

SEQ ID NO: 129216 - DNA, 25 bp, Homo sapien
aggaaaagtaggtcatcacgtcatg

SEQ ID NO: 129217 - DNA, 25 bp, Homo sapien
gttaaacttaggtacttcgaattct

SEQ ID NO: 129218 - DNA, 25 bp, Homo sapien
gttaaacttaggaacttcgaattct

SEQ ID NO: 129219 - DNA, 25 bp, Homo sapien
ggacagtacagcattacaacttact

SEQ ID NO: 129220 - DNA, 25 bp, Homo sapien
ggacagtacagctttacaacttact

SEQ ID NO: 129221 - DNA, 25 bp, Homo sapien
agagaagacccgttactaagacctc

SEQ ID NO: 129222 - DNA, 25 bp, Homo sapien
agagaagacccgatactaagacctc

SEQ ID NO: 129223 - DNA, 25 bp, Homo sapien
ttaaacggtaactccttttatagtg

SEQ ID NO: 129224 - DNA, 25 bp, Homo sapien
ttaaacggtaacaccttttatagtg

SEQ ID NO: 129225 - DNA, 25 bp, Homo sapien
tagaactggacacaaagtaactcga

SEQ ID NO: 129226 - DNA, 25 bp, Homo sapien
tagaactggacagaaagtaactcga

SEQ ID NO: 129227 - DNA, 25 bp, Homo sapien
agaggtagagaagaagacgtccaca

SEQ ID NO: 129228 - DNA, 25 bp, Homo sapien
agaggtagagaacaagacgtccaca

SEQ ID NO: 129229 - DNA, 25 bp, Homo sapien
ctcggtacgagaactcggcactcat

SEQ ID NO: 129230 - DNA, 25 bp, Homo sapien
ctcggtacgagatctcggcactcat

SEQ ID NO: 129231 - DNA, 25 bp, Homo sapien
gtttcagtatagttcgggtcatacc

SEQ ID NO: 129232 - DNA, 25 bp, Homo sapien
gtttcagtatagatcgggtcatacc

SEQ ID NO: 129233 - DNA, 25 bp, Homo sapien
agtttacggatgtcggtgacttctt

SEQ ID NO: 129234 - DNA, 25 bp, Homo sapien
agtttacggatgacggtgacttctt

SEQ ID NO: 129235 - DNA, 25 bp, Homo sapien
aacttcatgagcaccgtcatctctg

SEQ ID NO: 129236 - DNA, 25 bp, Homo sapien
aacttcatgagctccgtcatctctg

SEQ ID NO: 129237 - DNA, 25 bp, Homo sapien
agatctaatggtctcaccaacgagg

SEQ ID NO: 129238 - DNA, 25 bp, Homo sapien
agatctaatggtgtcaccaacgagg

SEQ ID NO: 129239 - DNA, 25 bp, Homo sapien
actaatcgtccgaccgaagatacag

SEQ ID NO: 129240 - DNA, 25 bp, Homo sapien
actaatcgtccgtccgaagatacag

SEQ ID NO: 129241 - DNA, 25 bp, Homo sapien
ccgtagtgtggtcaaacacgtaaag

SEQ ID NO: 129242 - DNA, 25 bp, Homo sapien
ccgtagtgtggtgaaacacgtaaag

SEQ ID NO: 129243 - DNA, 25 bp, Homo sapien
caggtgttaccgaaagaagtcacag

SEQ ID NO: 129244 - DNA, 25 bp, Homo sapien
caggtgttaccgtaagaagtcacag

SEQ ID NO: 129245 - DNA, 25 bp, Homo sapien
cagttttcggacacctacgtcgtgg

SEQ ID NO: 129246 - DNA, 25 bp, Homo sapien
cagttttcggactcctacgtcgtgg

SEQ ID NO: 129247 - DNA, 25 bp, Homo sapien
gagtacgttgagagcctacgaccag

SEQ ID NO: 129248 - DNA, 25 bp, Homo sapien
gagtacgttgagtgcctacgaccag

SEQ ID NO: 129249 - DNA, 25 bp, Homo sapien
gtttagatgtattttactcacctgt

SEQ ID NO: 129250 - DNA, 25 bp, Homo sapien
gtttagatgtatattactcacctgt

SEQ ID NO: 129251 - DNA, 25 bp, Homo sapien
tgcgtttgacggtgtttaccctctc

SEQ ID NO: 129252 - DNA, 25 bp, Homo sapien
tgcgtttgacggagtttaccctctc

SEQ ID NO: 129253 - DNA, 25 bp, Homo sapien
tataaagtgtgttgtaacgacttcc

SEQ ID NO: 129254 - DNA, 25 bp, Homo sapien
tataaagtgtgtagtaacgacttcc

SEQ ID NO: 129255 - DNA, 25 bp, Homo sapien
attagaactggtcgttactgttctt

SEQ ID NO: 129256 - DNA, 25 bp, Homo sapien
attagaactggtggttactgttctt

SEQ ID NO: 129257 - DNA, 25 bp, Homo sapien
tttctagtttgtcttcaggagttac

SEQ ID NO: 129258 - DNA, 25 bp, Homo sapien
tttctagtttgtgttcaggagttac

SEQ ID NO: 129259 - DNA, 25 bp, Homo sapien
acttccttcgatgttgaacgagtca

SEQ ID NO: 129260 - DNA, 25 bp, Homo sapien
acttccttcgatcttgaacgagtca

SEQ ID NO: 129261 - DNA, 25 bp, Homo sapien
gtacgcgagttttcgaacactacga

SEQ ID NO: 129262 - DNA, 25 bp, Homo sapien
gtacgcgagtttacgaacactacga

SEQ ID NO: 129263 - DNA, 25 bp, Homo sapien
cccgaactctttgagtaacagtatt

SEQ ID NO: 129264 - DNA, 25 bp, Homo sapien
cccgaactctttcagtaacagtatt

SEQ ID NO: 129265 - DNA, 25 bp, Homo sapien
taaacgtccacatgaacgtcgggta

SEQ ID NO: 129266 - DNA, 25 bp, Homo sapien
taaacgtccacaagaacgtcgggta

SEQ ID NO: 129267 - DNA, 25 bp, Homo sapien
taacagttaccaactaagtaggttt

SEQ ID NO: 129268 - DNA, 25 bp, Homo sapien
taacagttaccatctaagtaggttt

SEQ ID NO: 129269 - DNA, 25 bp, Homo sapien
aagatctccattacgtcgagtctgt

SEQ ID NO: 129270 - DNA, 25 bp, Homo sapien
aagatctccatttcgtcgagtctgt

SEQ ID NO: 129271 - DNA, 25 bp, Homo sapien
cgacgtcggactactctcggtcgac

SEQ ID NO: 129272 - DNA, 25 bp, Homo sapien
cgacgtcggacttctctcggtcgac

SEQ ID NO: 129273 - DNA, 25 bp, Homo sapien
caggtaacgactatcctcgggggtc

SEQ ID NO: 129274 - DNA, 25 bp, Homo sapien
caggtaacgactttcctcgggggtc

SEQ ID NO: 129275 - DNA, 25 bp, Homo sapien
ctggagactaggttccctgcagctc

SEQ ID NO: 129276 - DNA, 25 bp, Homo sapien
ctggagactaggatccctgcagctc

SEQ ID NO: 129277 - DNA, 25 bp, Homo sapien
gtggatcagtctctgtccgggaccg

SEQ ID NO: 129278 - DNA, 25 bp, Homo sapien
gtggatcagtctgtgtccgggaccg

SEQ ID NO: 129279 - DNA, 25 bp, Homo sapien
tggaccatccaggtctctcactcta

SEQ ID NO: 129280 - DNA, 25 bp, Homo sapien
tggaccatccagctctctcactcta

SEQ ID NO: 129281 - DNA, 25 bp, Homo sapien
gggccgcctacatcgacagcttcta

SEQ ID NO: 129282 - DNA, 25 bp, Homo sapien
gggccgcctacaacgacagcttcta

SEQ ID NO: 129283 - DNA, 25 bp, Homo sapien
cggaaaccactaatcgttaggttta

SEQ ID NO: 129284 - DNA, 25 bp, Homo sapien
cggaaaccactattcgttaggttta

SEQ ID NO: 129285 - DNA, 25 bp, Homo sapien
gatcagtgaacacgaaagtacctat

SEQ ID NO: 129286 - DNA, 25 bp, Homo sapien
gatcagtgaacaggaaagtacctat

SEQ ID NO: 129287 - DNA, 25 bp, Homo sapien
cctcgacggacagtaagtacgtcta

SEQ ID NO: 129288 - DNA, 25 bp, Homo sapien
cctcgacggacactaagtacgtcta

SEQ ID NO: 129289 - DNA, 25 bp, Homo sapien
caccgagtcactctaagactaacgt

SEQ ID NO: 129290 - DNA, 25 bp, Homo sapien
caccgagtcactgtaagactaacgt

SEQ ID NO: 129291 - DNA, 25 bp, Homo sapien
attcgttgaacttggaacgtctatt

SEQ ID NO: 129292 - DNA, 25 bp, Homo sapien
attcgttgaactaggaacgtctatt

SEQ ID NO: 129293 - DNA, 25 bp, Homo sapien
gtatggagactcaaggacctaccgt

SEQ ID NO: 129294 - DNA, 25 bp, Homo sapien
gtatggagactctaggacctaccgt

SEQ ID NO: 129295 - DNA, 25 bp, Homo sapien
gtcactgggtcctgtgtcgatactg

SEQ ID NO: 129296 - DNA, 25 bp, Homo sapien
gtcactgggtccagtgtcgatactg

SEQ ID NO: 129297 - DNA, 25 bp, Homo sapien
aatgttcaccttctttgtagtacgg

SEQ ID NO: 129298 - DNA, 25 bp, Homo sapien
aatgttcaccttgtttgtagtacgg

SEQ ID NO: 129299 - DNA, 25 bp, Homo sapien
agagtcttgtgttccccttttcggt

SEQ ID NO: 129300 - DNA, 25 bp, Homo sapien
agagtcttgtgtaccccttttcggt

SEQ ID NO: 129301 - DNA, 25 bp, Homo sapien
ggcgatccctccagtcgtttcttga

SEQ ID NO: 129302 - DNA, 25 bp, Homo sapien
ggcgatccctcctgtcgtttcttga

SEQ ID NO: 129303 - DNA, 25 bp, Homo sapien
tgtcattaaacctactatttatgag

SEQ ID NO: 129304 - DNA, 25 bp, Homo sapien
tgtcattaaaccaactatttatgag

SEQ ID NO: 129305 - DNA, 25 bp, Homo sapien
aaactgaacgtcttccgttagaaag

SEQ ID NO: 129306 - DNA, 25 bp, Homo sapien
aaactgaacgtcatccgttagaaag

SEQ ID NO: 129307 - DNA, 25 bp, Homo sapien
gaaaaaggtgactcctagactagaa

SEQ ID NO: 129308 - DNA, 25 bp, Homo sapien
gaaaaaggtgacacctagactagaa

SEQ ID NO: 129309 - DNA, 25 bp, Homo sapien
cacaatgacaacaaccgcgggaact

SEQ ID NO: 129310 - DNA, 25 bp, Homo sapien
cacaatgacaactaccgcgggaact

SEQ ID NO: 129311 - DNA, 25 bp, Homo sapien
ccgcaggggctctcccggagaacgt

SEQ ID NO: 129312 - DNA, 25 bp, Homo sapien
ccgcaggggctcacccggagaacgt

SEQ ID NO: 129313 - DNA, 25 bp, Homo sapien
tgcacggggtcctgcccgacgaaga

SEQ ID NO: 129314 - DNA, 25 bp, Homo sapien
tgcacggggtccagcccgacgaaga

SEQ ID NO: 129315 - DNA, 25 bp, Homo sapien
aaacaagaagtcctgttccgcacaa

SEQ ID NO: 129316 - DNA, 25 bp, Homo sapien
aaacaagaagtcgtgttccgcacaa

SEQ ID NO: 129317 - DNA, 25 bp, Homo sapien
ccatgattcatgttccgtccatagt

SEQ ID NO: 129318 - DNA, 25 bp, Homo sapien
ccatgattcatgatccgtccatagt

SEQ ID NO: 129319 - DNA, 25 bp, Homo sapien
atagtatgcttactccgggtaacgt

SEQ ID NO: 129320 - DNA, 25 bp, Homo sapien
atagtatgcttagtccgggtaacgt

SEQ ID NO: 129321 - DNA, 25 bp, Homo sapien
gtactatgtctttatctgacggttt

SEQ ID NO: 129322 - DNA, 25 bp, Homo sapien
gtactatgtcttaatctgacggttt

SEQ ID NO: 129323 - DNA, 25 bp, Homo sapien
cctgtggtgtactcgtacccaccgt

SEQ ID NO: 129324 - DNA, 25 bp, Homo sapien
cctgtggtgtacacgtacccaccgt

SEQ ID NO: 129325 - DNA, 25 bp, Homo sapien
ctctgagtgtgacctgtcccgtcct

SEQ ID NO: 129326 - DNA, 25 bp, Homo sapien
ctctgagtgtgagctgtcccgtcct

SEQ ID NO: 129327 - DNA, 25 bp, Homo sapien
accacgggtgctacggcaccggcgt

SEQ ID NO: 129328 - DNA, 25 bp, Homo sapien
accacgggtgcttcggcaccggcgt

SEQ ID NO: 129329 - DNA, 25 bp, Homo sapien
aacaaagaggagtccacaaaggagg

SEQ ID NO: 129330 - DNA, 25 bp, Homo sapien
aacaaagaggagaccacaaaggagg

SEQ ID NO: 129331 - DNA, 25 bp, Homo sapien
aatgacgagagttcctcggaaggca

SEQ ID NO: 129332 - DNA, 25 bp, Homo sapien
aatgacgagagtacctcggaaggca

SEQ ID NO: 129333 - DNA, 25 bp, Homo sapien
tcagaagtcgtagtaaccacggtga

SEQ ID NO: 129334 - DNA, 25 bp, Homo sapien
tcagaagtcgtactaaccacggtga

SEQ ID NO: 129335 - DNA, 25 bp, Homo sapien
gggccaactactcttaccacgggac

SEQ ID NO: 129336 - DNA, 25 bp, Homo sapien
gggccaactactgttaccacgggac

SEQ ID NO: 129337 - DNA, 25 bp, Homo sapien
ggacgcacctctagaaccgggtgta

SEQ ID NO: 129338 - DNA, 25 bp, Homo sapien
ggacgcacctcttgaaccgggtgta

SEQ ID NO: 129339 - DNA, 25 bp, Homo sapien
ttggaaaccggttctcaagaggtga

SEQ ID NO: 129340 - DNA, 25 bp, Homo sapien
ttggaaaccggtactcaagaggtga

SEQ ID NO: 129341 - DNA, 25 bp, Homo sapien
tgttaaaacgtttaccagaaatgtc

SEQ ID NO: 129342 - DNA, 25 bp, Homo sapien
tgttaaaacgttaaccagaaatgtc

SEQ ID NO: 129343 - DNA, 25 bp, Homo sapien
aagggtctcatttaaagaacctaac

SEQ ID NO: 129344 - DNA, 25 bp, Homo sapien
aagggtctcattaaaagaacctaac

SEQ ID NO: 129345 - DNA, 25 bp, Homo sapien
aagaggtttttagacatcccttacg

SEQ ID NO: 129346 - DNA, 25 bp, Homo sapien
aagaggtttttacacatcccttacg

SEQ ID NO: 129347 - DNA, 25 bp, Homo sapien
acaggtttgaatcgtggacgttaac

SEQ ID NO: 129348 - DNA, 25 bp, Homo sapien
acaggtttgaatggtggacgttaac

SEQ ID NO: 129349 - DNA, 25 bp, Homo sapien
taattcgagaactcggagtcttacc

SEQ ID NO: 129350 - DNA, 25 bp, Homo sapien
taattcgagaacacggagtcttacc

SEQ ID NO: 129351 - DNA, 25 bp, Homo sapien
tgtggactcctgacaagttcaccca

SEQ ID NO: 129352 - DNA, 25 bp, Homo sapien
tgtggactcctgtcaagttcaccca

SEQ ID NO: 129353 - DNA, 25 bp, Homo sapien
ggtactaagaatcaatgtaccctcc

SEQ ID NO: 129354 - DNA, 25 bp, Homo sapien
ggtactaagaatgaatgtaccctcc

SEQ ID NO: 129355 - DNA, 25 bp, Homo sapien
acttgtcggaggagtcgcgtccagg

SEQ ID NO: 129356 - DNA, 25 bp, Homo sapien
acttgtcggaggtgtcgcgtccagg

SEQ ID NO: 129357 - DNA, 25 bp, Homo sapien
ctcattaggggtcgtccgtctccgg

SEQ ID NO: 129358 - DNA, 25 bp, Homo sapien
ctcattaggggtggtccgtctccgg

SEQ ID NO: 129359 - DNA, 25 bp, Homo sapien
cgtttagttggaggttgccccggta

SEQ ID NO: 129360 - DNA, 25 bp, Homo sapien
cgtttagttggacgttgccccggta

SEQ ID NO: 129361 - DNA, 25 bp, Homo sapien
aatataatgttcctacgggtcatta

SEQ ID NO: 129362 - DNA, 25 bp, Homo sapien
aatataatgttcgtacgggtcatta

SEQ ID NO: 129363 - DNA, 25 bp, Homo sapien
atatatgttatctgttctgtcctga

SEQ ID NO: 129364 - DNA, 25 bp, Homo sapien
atatatgttatcagttctgtcctga

SEQ ID NO: 129365 - DNA, 25 bp, Homo sapien
ctcccgtgacgtacggttgtcaggg

SEQ ID NO: 129366 - DNA, 25 bp, Homo sapien
ctcccgtgacgttcggttgtcaggg

SEQ ID NO: 129367 - DNA, 25 bp, Homo sapien
gagtcacgggatagaggtacctttg

SEQ ID NO: 129368 - DNA, 25 bp, Homo sapien
gagtcacgggattgaggtacctttg

SEQ ID NO: 129369 - DNA, 25 bp, Homo sapien
ttctctcgacattggggaccttttc

SEQ ID NO: 129370 - DNA, 25 bp, Homo sapien
ttctctcgacataggggaccttttc

SEQ ID NO: 129371 - DNA, 25 bp, Homo sapien
gtcgcctctaagactgcctgtcttc

SEQ ID NO: 129372 - DNA, 25 bp, Homo sapien
gtcgcctctaagtctgcctgtcttc

SEQ ID NO: 129373 - DNA, 25 bp, Homo sapien
tccttcttgtgttccacccgagtaa

SEQ ID NO: 129374 - DNA, 25 bp, Homo sapien
tccttcttgtgtaccacccgagtaa

SEQ ID NO: 129375 - DNA, 25 bp, Homo sapien
tcctgtgtgacactccgacccagga

SEQ ID NO: 129376 - DNA, 25 bp, Homo sapien
tcctgtgtgacagtccgacccagga

SEQ ID NO: 129377 - DNA, 25 bp, Homo sapien
cccagtcaggagttcgcctacaaga

SEQ ID NO: 129378 - DNA, 25 bp, Homo sapien
cccagtcaggagatcgcctacaaga

SEQ ID NO: 129379 - DNA, 25 bp, Homo sapien
acactgtctgagttcccgaccaaac

SEQ ID NO: 129380 - DNA, 25 bp, Homo sapien
acactgtctgagatcccgaccaaac

SEQ ID NO: 129381 - DNA, 25 bp, Homo sapien
gacatcttgaactccgaagacaggt

SEQ ID NO: 129382 - DNA, 25 bp, Homo sapien
gacatcttgaacaccgaagacaggt

SEQ ID NO: 129383 - DNA, 25 bp, Homo sapien
cgtcccggacgtcgagggagaacat

SEQ ID NO: 129384 - DNA, 25 bp, Homo sapien
cgtcccggacgtggagggagaacat

SEQ ID NO: 129385 - DNA, 25 bp, Homo sapien
gactcgggacggtgacttgacacct

SEQ ID NO: 129386 - DNA, 25 bp, Homo sapien
gactcgggacggagacttgacacct

SEQ ID NO: 129387 - DNA, 25 bp, Homo sapien
tgtcaggccgaccaacgaagaagat

SEQ ID NO: 129388 - DNA, 25 bp, Homo sapien
tgtcaggccgacgaacgaagaagat

SEQ ID NO: 129389 - DNA, 25 bp, Homo sapien
cggaggaccctcgacgagtgataga

SEQ ID NO: 129390 - DNA, 25 bp, Homo sapien
cggaggaccctccacgagtgataga

SEQ ID NO: 129391 - DNA, 25 bp, Homo sapien
ccggtcgcagccacgcgtggtaaga

SEQ ID NO: 129392 - DNA, 25 bp, Homo sapien
ccggtcgcagcctcgcgtggtaaga

SEQ ID NO: 129393 - DNA, 25 bp, Homo sapien
ggtccgaggtcgctgagtagaaatc

SEQ ID NO: 129394 - DNA, 25 bp, Homo sapien
ggtccgaggtcggtgagtagaaatc

SEQ ID NO: 129395 - DNA, 25 bp, Homo sapien
ggtggagtgtcttggacgtaaactc

SEQ ID NO: 129396 - DNA, 25 bp, Homo sapien
ggtggagtgtctaggacgtaaactc

SEQ ID NO: 129397 - DNA, 25 bp, Homo sapien
tcgagagtgtcgacatcgtaaatat

SEQ ID NO: 129398 - DNA, 25 bp, Homo sapien
tcgagagtgtcgtcatcgtaaatat

SEQ ID NO: 129399 - DNA, 25 bp, Homo sapien
aacatgtgtcctgtccttatctgtg

SEQ ID NO: 129400 - DNA, 25 bp, Homo sapien
aacatgtgtcctctccttatctgtg

SEQ ID NO: 129401 - DNA, 25 bp, Homo sapien
gtatgagtactttcccggtctgtcg

SEQ ID NO: 129402 - DNA, 25 bp, Homo sapien
gtatgagtacttacccggtctgtcg

SEQ ID NO: 129403 - DNA, 25 bp, Homo sapien
gggtctttacacttcccggaggtag

SEQ ID NO: 129404 - DNA, 25 bp, Homo sapien
gggtctttacacatcccggaggtag

SEQ ID NO: 129405 - DNA, 25 bp, Homo sapien
ctccgggtccccaggtctcaaggac

SEQ ID NO: 129406 - DNA, 25 bp, Homo sapien
ctccgggtcccctggtctcaaggac

SEQ ID NO: 129407 - DNA, 25 bp, Homo sapien
ccgtccgtccggtggttccgaaact

SEQ ID NO: 129408 - DNA, 25 bp, Homo sapien
ccgtccgtccggaggttccgaaact

SEQ ID NO: 129409 - DNA, 25 bp, Homo sapien
ccgtcgtgccccaggacgtggaaca

SEQ ID NO: 129410 - DNA, 25 bp, Homo sapien
ccgtcgtgcccctggacgtggaaca

SEQ ID NO: 129411 - DNA, 25 bp, Homo sapien
aaacggtttccttacgatataaatg

SEQ ID NO: 129412 - DNA, 25 bp, Homo sapien
aaacggtttcctaacgatataaatg

SEQ ID NO: 129413 - DNA, 25 bp, Homo sapien
atttcggttcccttgtaaacaagtg

SEQ ID NO: 129414 - DNA, 25 bp, Homo sapien
atttcggttcccatgtaaacaagtg

SEQ ID NO: 129415 - DNA, 25 bp, Homo sapien
gtcactaccacttacaccactgtcg

SEQ ID NO: 129416 - DNA, 25 bp, Homo sapien
gtcactaccactaacaccactgtcg

SEQ ID NO: 129417 - DNA, 25 bp, Homo sapien
gagacggaccccagaatacctcttt

SEQ ID NO: 129418 - DNA, 25 bp, Homo sapien
gagacggacccctgaatacctcttt

SEQ ID NO: 129419 - DNA, 25 bp, Homo sapien
aggtaggtccccaacatccggtgtc

SEQ ID NO: 129420 - DNA, 25 bp, Homo sapien
aggtaggtcccctacatccggtgtc

SEQ ID NO: 129421 - DNA, 25 bp, Homo sapien
gtatacatttcgtttaaaccttgtg

SEQ ID NO: 129422 - DNA, 25 bp, Homo sapien
gtatacatttcgattaaaccttgtg

SEQ ID NO: 129423 - DNA, 25 bp, Homo sapien
gatttcaccgatacacacagtttcg

SEQ ID NO: 129424 - DNA, 25 bp, Homo sapien
gatttcaccgattcacacagtttcg

SEQ ID NO: 129425 - DNA, 25 bp, Homo sapien
tcggactacggtacactagatctcg

SEQ ID NO: 129426 - DNA, 25 bp, Homo sapien
tcggactacggttcactagatctcg

SEQ ID NO: 129427 - DNA, 25 bp, Homo sapien
tcttcgagagggtcaggtctcgtcg

SEQ ID NO: 129428 - DNA, 25 bp, Homo sapien
tcttcgagagggacaggtctcgtcg

SEQ ID NO: 129429 - DNA, 25 bp, Homo sapien
ccggaaaagtaacgagtacgtcagt

SEQ ID NO: 129430 - DNA, 25 bp, Homo sapien
ccggaaaagtaaggagtacgtcagt

SEQ ID NO: 129431 - DNA, 25 bp, Homo sapien
ttacgtattaactgggaacgtcgat

SEQ ID NO: 129432 - DNA, 25 bp, Homo sapien
ttacgtattaacagggaacgtcgat

SEQ ID NO: 129433 - DNA, 25 bp, Homo sapien
gttttgcttttatttcggggtctct

SEQ ID NO: 129434 - DNA, 25 bp, Homo sapien
gttttgcttttaattcggggtctct

SEQ ID NO: 129435 - DNA, 25 bp, Homo sapien
caaacgacctttttgtccgccggtg

SEQ ID NO: 129436 - DNA, 25 bp, Homo sapien
caaacgacctttatgtccgccggtg

SEQ ID NO: 129437 - DNA, 25 bp, Homo sapien
acctaggtctgaacggcgtaggtgt

SEQ ID NO: 129438 - DNA, 25 bp, Homo sapien
acctaggtctgatcggcgtaggtgt

SEQ ID NO: 129439 - DNA, 25 bp, Homo sapien
ggcgctactcaccatgaggtacatg

SEQ ID NO: 129440 - DNA, 25 bp, Homo sapien
ggcgctactcacgatgaggtacatg

SEQ ID NO: 129441 - DNA, 25 bp, Homo sapien
gtagtccgttgagttcgtcgtcttg

SEQ ID NO: 129442 - DNA, 25 bp, Homo sapien
gtagtccgttgacttcgtcgtcttg

SEQ ID NO: 129443 - DNA, 25 bp, Homo sapien
agtacacttactcgtgaggttatag

SEQ ID NO: 129444 - DNA, 25 bp, Homo sapien
agtacacttactggtgaggttatag

SEQ ID NO: 129445 - DNA, 25 bp, Homo sapien
acgaacggaaatgagtcgatcataa

SEQ ID NO: 129446 - DNA, 25 bp, Homo sapien
acgaacggaaatcagtcgatcataa

SEQ ID NO: 129447 - DNA, 25 bp, Homo sapien
gtccagcaaaggacacactctcata

SEQ ID NO: 129448 - DNA, 25 bp, Homo sapien
gtccagcaaaggtcacactctcata

SEQ ID NO: 129449 - DNA, 25 bp, Homo sapien
gaccaggaacatggtcatgtgaaag

SEQ ID NO: 129450 - DNA, 25 bp, Homo sapien
gaccaggaacatcgtcatgtgaaag

SEQ ID NO: 129451 - DNA, 25 bp, Homo sapien
gagctaagagcagatattgtcctga

SEQ ID NO: 129452 - DNA, 25 bp, Homo sapien
gagctaagagcacatattgtcctga

SEQ ID NO: 129453 - DNA, 25 bp, Homo sapien
cgacaggggtcacatcttgtccctc

SEQ ID NO: 129454 - DNA, 25 bp, Homo sapien
cgacaggggtcagatcttgtccctc

SEQ ID NO: 129455 - DNA, 25 bp, Homo sapien
ggatgtggttcaaatatttccctct

SEQ ID NO: 129456 - DNA, 25 bp, Homo sapien
ggatgtggttcatatatttccctct

SEQ ID NO: 129457 - DNA, 25 bp, Homo sapien
ggacgaggaaacctgctcttccctt

SEQ ID NO: 129458 - DNA, 25 bp, Homo sapien
ggacgaggaaacgtgctcttccctt

SEQ ID NO: 129459 - DNA, 25 bp, Homo sapien
caggatctacatcatctcgccgtgg

SEQ ID NO: 129460 - DNA, 25 bp, Homo sapien
caggatctacatgatctcgccgtgg

SEQ ID NO: 129461 - DNA, 25 bp, Homo sapien
ctggtgctacatgaagacctgtgag

SEQ ID NO: 129462 - DNA, 25 bp, Homo sapien
ctggtgctacatcaagacctgtgag

SEQ ID NO: 129463 - DNA, 25 bp, Homo sapien
ttatagggtcaacagaaagacacta

SEQ ID NO: 129464 - DNA, 25 bp, Homo sapien
ttatagggtcaagagaaagacacta

SEQ ID NO: 129465 - DNA, 25 bp, Homo sapien
tagctttaaggtgaacgcgaccgag

SEQ ID NO: 129466 - DNA, 25 bp, Homo sapien
tagctttaaggtcaacgcgaccgag

SEQ ID NO: 129467 - DNA, 25 bp, Homo sapien
gtacatggtttacagtgtgaccgac

SEQ ID NO: 129468 - DNA, 25 bp, Homo sapien
gtacatggtttagagtgtgaccgac

SEQ ID NO: 129469 - DNA, 25 bp, Homo sapien
ttctcgagtatttgtacgaggcaga

SEQ ID NO: 129470 - DNA, 25 bp, Homo sapien
ttctcgagtattagtacgaggcaga

SEQ ID NO: 129471 - DNA, 25 bp, Homo sapien
tgcttgagtcctagtcagagtaagg

SEQ ID NO: 129472 - DNA, 25 bp, Homo sapien
tgcttgagtccttgtcagagtaagg

SEQ ID NO: 129473 - DNA, 25 bp, Homo sapien
ccctgtggcgtcatgagagacgtga

SEQ ID NO: 129474 - DNA, 25 bp, Homo sapien
ccctgtggcgtcttgagagacgtga

SEQ ID NO: 129475 - DNA, 25 bp, Homo sapien
cactcctcgtgtcaatcgtttcatg

SEQ ID NO: 129476 - DNA, 25 bp, Homo sapien
cactcctcgtgtgaatcgtttcatg

SEQ ID NO: 129477 - DNA, 25 bp, Homo sapien
ccgtccctgaggatccttagcagtg

SEQ ID NO: 129478 - DNA, 25 bp, Homo sapien
ccgtccctgaggttccttagcagtg

SEQ ID NO: 129479 - DNA, 25 bp, Homo sapien
tccccacgggacgtagagtccgacg

SEQ ID NO: 129480 - DNA, 25 bp, Homo sapien
tccccacgggacctagagtccgacg

SEQ ID NO: 129481 - DNA, 25 bp, Homo sapien
acaccttcacgacgtgactcagacg

SEQ ID NO: 129482 - DNA, 25 bp, Homo sapien
acaccttcacgaggtgactcagacg

SEQ ID NO: 129483 - DNA, 25 bp, Homo sapien
acacactcgtcgaggagtcgacttc

SEQ ID NO: 129484 - DNA, 25 bp, Homo sapien
acacactcgtcgtggagtcgacttc

SEQ ID NO: 129485 - DNA, 25 bp, Homo sapien
aacacatctacctggttcgtcaccg

SEQ ID NO: 129486 - DNA, 25 bp, Homo sapien
aacacatctaccaggttcgtcaccg

SEQ ID NO: 129487 - DNA, 25 bp, Homo sapien
caatgaacctctaaagtctgttccg

SEQ ID NO: 129488 - DNA, 25 bp, Homo sapien
caatgaacctcttaagtctgttccg

SEQ ID NO: 129489 - DNA, 25 bp, Homo sapien
gaagagaacccgacagaccttcgcc

SEQ ID NO: 129490 - DNA, 25 bp, Homo sapien
gaagagaacccgtcagaccttcgcc

SEQ ID NO: 129491 - DNA, 25 bp, Homo sapien
agaatccaatcagctcctgtctacg

SEQ ID NO: 129492 - DNA, 25 bp, Homo sapien
agaatccaatcacctcctgtctacg

SEQ ID NO: 129493 - DNA, 25 bp, Homo sapien
tggacgagtcccaacatgggcttct

SEQ ID NO: 129494 - DNA, 25 bp, Homo sapien
tggacgagtccctacatgggcttct

SEQ ID NO: 129495 - DNA, 25 bp, Homo sapien
ggaacccggagtagtcgttgtcgga

SEQ ID NO: 129496 - DNA, 25 bp, Homo sapien
ggaacccggagttgtcgttgtcgga

SEQ ID NO: 129497 - DNA, 25 bp, Homo sapien
ttcttgttattacgtatgtcgtcac

SEQ ID NO: 129498 - DNA, 25 bp, Homo sapien
ttcttgttattaggtatgtcgtcac

SEQ ID NO: 129499 - DNA, 25 bp, Homo sapien
cttctttcgactttgagactgatta

SEQ ID NO: 129500 - DNA, 25 bp, Homo sapien
cttctttcgactatgagactgatta

SEQ ID NO: 129501 - DNA, 25 bp, Homo sapien
ccgtcggctcgagaccctgattagt

SEQ ID NO: 129502 - DNA, 25 bp, Homo sapien
ccgtcggctcgacaccctgattagt

SEQ ID NO: 129503 - DNA, 25 bp, Homo sapien
ccgtagacacctaaatccatatgag

SEQ ID NO: 129504 - DNA, 25 bp, Homo sapien
ccgtagacaccttaatccatatgag

SEQ ID NO: 129505 - DNA, 25 bp, Homo sapien
ctagacgacctgtatcaactgttgt

SEQ ID NO: 129506 - DNA, 25 bp, Homo sapien
ctagacgacctgaatcaactgttgt

SEQ ID NO: 129507 - DNA, 25 bp, Homo sapien
cacagtgacttgtgtgactcctcta

SEQ ID NO: 129508 - DNA, 25 bp, Homo sapien
cacagtgacttgagtgactcctcta

SEQ ID NO: 129509 - DNA, 25 bp, Homo sapien
ttgaggtacctgtctgtgatcacca

SEQ ID NO: 129510 - DNA, 25 bp, Homo sapien
ttgaggtacctgactgtgatcacca

SEQ ID NO: 129511 - DNA, 25 bp, Homo sapien
gaagggctctcatcgtcaacaacta

SEQ ID NO: 129512 - DNA, 25 bp, Homo sapien
gaagggctctcaacgtcaacaacta

SEQ ID NO: 129513 - DNA, 25 bp, Homo sapien
gaaccgtccgcctcggtggaaccgg

SEQ ID NO: 129514 - DNA, 25 bp, Homo sapien
gaaccgtccgccacggtggaaccgg

SEQ ID NO: 129515 - DNA, 25 bp, Homo sapien
caacgcctaccaaagtcggaaccgg

SEQ ID NO: 129516 - DNA, 25 bp, Homo sapien
caacgcctaccatagtcggaaccgg

SEQ ID NO: 129517 - DNA, 25 bp, Homo sapien
ataaatcacaattaccggacaggtg

SEQ ID NO: 129518 - DNA, 25 bp, Homo sapien
ataaatcacaataaccggacaggtg

SEQ ID NO: 129519 - DNA, 25 bp, Homo sapien
ttatggaccacgtatccaacaacag

SEQ ID NO: 129520 - DNA, 25 bp, Homo sapien
ttatggaccacgaatccaacaacag

SEQ ID NO: 129521 - DNA, 25 bp, Homo sapien
gaaaggtccttaagacaacacaaca

SEQ ID NO: 129522 - DNA, 25 bp, Homo sapien
gaaaggtccttatgacaacacaaca

SEQ ID NO: 129523 - DNA, 25 bp, Homo sapien
gggagtgttttagtccaccgactta

SEQ ID NO: 129524 - DNA, 25 bp, Homo sapien
gggagtgttttactccaccgactta

SEQ ID NO: 129525 - DNA, 25 bp, Homo sapien
gttgtttctgaaatcctatgctatt

SEQ ID NO: 129526 - DNA, 25 bp, Homo sapien
gttgtttctgaattcctatgctatt

SEQ ID NO: 129527 - DNA, 25 bp, Homo sapien
ggtttaaatgtagacgtaggtcacc

SEQ ID NO: 129528 - DNA, 25 bp, Homo sapien
ggtttaaatgtacacgtaggtcacc

SEQ ID NO: 129529 - DNA, 25 bp, Homo sapien
tttgtttcacttgttagacggactc

SEQ ID NO: 129530 - DNA, 25 bp, Homo sapien
tttgtttcacttcttagacggactc

SEQ ID NO: 129531 - DNA, 25 bp, Homo sapien
ttttattcacgttgtctccaggaac

SEQ ID NO: 129532 - DNA, 25 bp, Homo sapien
ttttattcacgtagtctccaggaac

SEQ ID NO: 129533 - DNA, 25 bp, Homo sapien
tctcttgttcggtacccctggactg

SEQ ID NO: 129534 - DNA, 25 bp, Homo sapien
tctcttgttcggaacccctggactg

SEQ ID NO: 129535 - DNA, 25 bp, Homo sapien
ttttgatgttaatcgacttgatacc

SEQ ID NO: 129536 - DNA, 25 bp, Homo sapien
ttttgatgttaaacgacttgatacc

SEQ ID NO: 129537 - DNA, 25 bp, Homo sapien
ttagtaatgttgttcgacctttcct

SEQ ID NO: 129538 - DNA, 25 bp, Homo sapien
ttagtaatgttgatcgacctttcct

SEQ ID NO: 129539 - DNA, 25 bp, Homo sapien
ttgtcgattctaatagaccttttgt

SEQ ID NO: 129540 - DNA, 25 bp, Homo sapien
ttgtcgattctattagaccttttgt

SEQ ID NO: 129541 - DNA, 25 bp, Homo sapien
gggggtcctttcgtcgaccttttgt

SEQ ID NO: 129542 - DNA, 25 bp, Homo sapien
gggggtcctttcctcgaccttttgt

SEQ ID NO: 129543 - DNA, 25 bp, Homo sapien
gaagtacatttgtcaagatctacct

SEQ ID NO: 129544 - DNA, 25 bp, Homo sapien
gaagtacatttgacaagatctacct

SEQ ID NO: 129545 - DNA, 25 bp, Homo sapien
tactagttgtgaaacttcgttctac

SEQ ID NO: 129546 - DNA, 25 bp, Homo sapien
tactagttgtgatacttcgttctac

SEQ ID NO: 129547 - DNA, 25 bp, Homo sapien
actgtatgtttcaaacgattgacac

SEQ ID NO: 129548 - DNA, 25 bp, Homo sapien
actgtatgtttctaacgattgacac

SEQ ID NO: 129549 - DNA, 25 bp, Homo sapien
atatgtgtctgctatgtttgctcgt

SEQ ID NO: 129550 - DNA, 25 bp, Homo sapien
atatgtgtctgcaatgtttgctcgt

SEQ ID NO: 129551 - DNA, 25 bp, Homo sapien
accttgtctctgtgtgttaaccctg

SEQ ID NO: 129552 - DNA, 25 bp, Homo sapien
accttgtctctgagtgttaaccctg

SEQ ID NO: 129553 - DNA, 25 bp, Homo sapien
tttttccgtccgttacgtctctgtg

SEQ ID NO: 129554 - DNA, 25 bp, Homo sapien
tttttccgtccgatacgtctctgtg

SEQ ID NO: 129555 - DNA, 25 bp, Homo sapien
ctacgtatacgttagtcacgtgtct

SEQ ID NO: 129556 - DNA, 25 bp, Homo sapien
ctacgtatacgtaagtcacgtgtct

SEQ ID NO: 129557 - DNA, 25 bp, Homo sapien
acagacctgatagctaacttggtct

SEQ ID NO: 129558 - DNA, 25 bp, Homo sapien
acagacctgatacctaacttggtct

SEQ ID NO: 129559 - DNA, 25 bp, Homo sapien
actggctacgaaacgagtctttatt

SEQ ID NO: 129560 - DNA, 25 bp, Homo sapien
actggctacgaatcgagtctttatt

SEQ ID NO: 129561 - DNA, 25 bp, Homo sapien
ttagaaccgataacacagtgttctt

SEQ ID NO: 129562 - DNA, 25 bp, Homo sapien
ttagaaccgatatcacagtgttctt

SEQ ID NO: 129563 - DNA, 25 bp, Homo sapien
tgtacaaacgtttcggttagtcgaa

SEQ ID NO: 129564 - DNA, 25 bp, Homo sapien
tgtacaaacgttacggttagtcgaa

SEQ ID NO: 129565 - DNA, 25 bp, Homo sapien
gtcttcgaatcaccagtgtttgttt

SEQ ID NO: 129566 - DNA, 25 bp, Homo sapien
gtcttcgaatcagcagtgtttgttt

SEQ ID NO: 129567 - DNA, 25 bp, Homo sapien
gttcctttgtcacctgtgtaccttt

SEQ ID NO: 129568 - DNA, 25 bp, Homo sapien
gttcctttgtcagctgtgtaccttt

SEQ ID NO: 129569 - DNA, 25 bp, Homo sapien
gtgacttcagtccaaaagatatttt

SEQ ID NO: 129570 - DNA, 25 bp, Homo sapien
gtgacttcagtcgaaaagatatttt

SEQ ID NO: 129571 - DNA, 25 bp, Homo sapien
atgccagatcccaagtgtcattgtt

SEQ ID NO: 129572 - DNA, 25 bp, Homo sapien
atgccagatccctagtgtcattgtt

SEQ ID NO: 129573 - DNA, 25 bp, Homo sapien
ccgtctcttcgcacgagtcatcttg

SEQ ID NO: 129574 - DNA, 25 bp, Homo sapien
ccgtctcttcgctcgagtcatcttg

SEQ ID NO: 129575 - DNA, 25 bp, Homo sapien
ctccctgattcgtagatacatcttg

SEQ ID NO: 129576 - DNA, 25 bp, Homo sapien
ctccctgattcgaagatacatcttg

SEQ ID NO: 129577 - DNA, 25 bp, Homo sapien
tgcctttatgtgttagacattattc

SEQ ID NO: 129578 - DNA, 25 bp, Homo sapien
tgcctttatgtgatagacattattc

SEQ ID NO: 129579 - DNA, 25 bp, Homo sapien
tcttcccggtctttcggtgaaattt

SEQ ID NO: 129580 - DNA, 25 bp, Homo sapien
tcttcccggtctatcggtgaaattt

SEQ ID NO: 129581 - DNA, 25 bp, Homo sapien
cgacctagtcatttgtgcggttatt

SEQ ID NO: 129582 - DNA, 25 bp, Homo sapien
cgacctagtcatatgtgcggttatt

SEQ ID NO: 129583 - DNA, 25 bp, Homo sapien
acgcctggggtcgtctcgcgcatct

SEQ ID NO: 129584 - DNA, 25 bp, Homo sapien
acgcctggggtcctctcgcgcatct

SEQ ID NO: 129585 - DNA, 25 bp, Homo sapien
gtacccgctgggtacaggggttctc

SEQ ID NO: 129586 - DNA, 25 bp, Homo sapien
gtacccgctgggaacaggggttctc

SEQ ID NO: 129587 - DNA, 25 bp, Homo sapien
atggagtgtgggtcgactcctttgt

SEQ ID NO: 129588 - DNA, 25 bp, Homo sapien
atggagtgtgggacgactcctttgt

SEQ ID NO: 129589 - DNA, 25 bp, Homo sapien
atgacagaggcgaaatacccaccat

SEQ ID NO: 129590 - DNA, 25 bp, Homo sapien
atgacagaggcgtaatacccaccat

SEQ ID NO: 129591 - DNA, 25 bp, Homo sapien
aaacgacaagggaccaccaagactg

SEQ ID NO: 129592 - DNA, 25 bp, Homo sapien
aaacgacaagggtccaccaagactg

SEQ ID NO: 129593 - DNA, 25 bp, Homo sapien
cgtccggtaagacactgtcaaggat

SEQ ID NO: 129594 - DNA, 25 bp, Homo sapien
cgtccggtaagagactgtcaaggat

SEQ ID NO: 129595 - DNA, 25 bp, Homo sapien
attaatatcgacagttctcaaggtc

SEQ ID NO: 129596 - DNA, 25 bp, Homo sapien
attaatatcgactgttctcaaggtc

SEQ ID NO: 129597 - DNA, 25 bp, Homo sapien
cagagaccgcagaacacgagagtta

SEQ ID NO: 129598 - DNA, 25 bp, Homo sapien
cagagaccgcagtacacgagagtta

SEQ ID NO: 129599 - DNA, 25 bp, Homo sapien
tacatgacaccaataacgacagaag

SEQ ID NO: 129600 - DNA, 25 bp, Homo sapien
tacatgacaccattaacgacagaag

SEQ ID NO: 129601 - DNA, 25 bp, Homo sapien
tggggacccgggatctcgatccaac

SEQ ID NO: 129602 - DNA, 25 bp, Homo sapien
tggggacccgggttctcgatccaac

SEQ ID NO: 129603 - DNA, 25 bp, Homo sapien
cgacgtcccgggttccgtgcgcaga

SEQ ID NO: 129604 - DNA, 25 bp, Homo sapien
cgacgtcccgggatccgtgcgcaga

SEQ ID NO: 129605 - DNA, 25 bp, Homo sapien
tcgaccgtccagagccggtggagct

SEQ ID NO: 129606 - DNA, 25 bp, Homo sapien
tcgaccgtccagtgccggtggagct

SEQ ID NO: 129607 - DNA, 25 bp, Homo sapien
tcgggtcggagttcccggtccttct

SEQ ID NO: 129608 - DNA, 25 bp, Homo sapien
tcgggtcggagtacccggtccttct

SEQ ID NO: 129609 - DNA, 25 bp, Homo sapien
cccgatcggactagacaggtccttg

SEQ ID NO: 129610 - DNA, 25 bp, Homo sapien
cccgatcggacttgacaggtccttg

SEQ ID NO: 129611 - DNA, 25 bp, Homo sapien
ttcatatttttcagtagtcactagg

SEQ ID NO: 129612 - DNA, 25 bp, Homo sapien
ttcatatttttctgtagtcactagg

SEQ ID NO: 129613 - DNA, 25 bp, Homo sapien
tttaaccgtcatttttactgttgag

SEQ ID NO: 129614 - DNA, 25 bp, Homo sapien
tttaaccgtcatatttactgttgag

SEQ ID NO: 129615 - DNA, 25 bp, Homo sapien
ttcgtacacccgaccgatttttgca

SEQ ID NO: 129616 - DNA, 25 bp, Homo sapien
ttcgtacacccgtccgatttttgca

SEQ ID NO: 129617 - DNA, 25 bp, Homo sapien
agaaagagcccgtttgtgtagacct

SEQ ID NO: 129618 - DNA, 25 bp, Homo sapien
agaaagagcccgattgtgtagacct

SEQ ID NO: 129619 - DNA, 25 bp, Homo sapien
tgaaccagttcgtcttgatcgttga

SEQ ID NO: 129620 - DNA, 25 bp, Homo sapien
tgaaccagttcgacttgatcgttga

SEQ ID NO: 129621 - DNA, 25 bp, Homo sapien
tggtgacatcaattcttgtgactga

SEQ ID NO: 129622 - DNA, 25 bp, Homo sapien
tggtgacatcaaatcttgtgactga

SEQ ID NO: 129623 - DNA, 25 bp, Homo sapien
ttgtgctaccaagtcttcgtcccat

SEQ ID NO: 129624 - DNA, 25 bp, Homo sapien
ttgtgctaccaactcttcgtcccat

SEQ ID NO: 129625 - DNA, 25 bp, Homo sapien
accgacaccggacgtcctcgggaag

SEQ ID NO: 129626 - DNA, 25 bp, Homo sapien
accgacaccggaggtcctcgggaag

SEQ ID NO: 129627 - DNA, 25 bp, Homo sapien
actgccacgggctcttcgcgaacag

SEQ ID NO: 129628 - DNA, 25 bp, Homo sapien
actgccacgggcacttcgcgaacag

SEQ ID NO: 129629 - DNA, 25 bp, Homo sapien
gtcccgggacgtcctctggtacaag

SEQ ID NO: 129630 - DNA, 25 bp, Homo sapien
gtcccgggacgtgctctggtacaag

SEQ ID NO: 129631 - DNA, 25 bp, Homo sapien
tgaccgggtcggtctctcgtactcc

SEQ ID NO: 129632 - DNA, 25 bp, Homo sapien
tgaccgggtcggactctcgtactcc

SEQ ID NO: 129633 - DNA, 25 bp, Homo sapien
ggaccgagaacgtgtctcttctctt

SEQ ID NO: 129634 - DNA, 25 bp, Homo sapien
ggaccgagaacgagtctcttctctt

SEQ ID NO: 129635 - DNA, 25 bp, Homo sapien
tgtcggtggatggttcttcttctct

SEQ ID NO: 129636 - DNA, 25 bp, Homo sapien
tgtcggtggatgcttcttcttctct

SEQ ID NO: 129637 - DNA, 25 bp, Homo sapien
tgaagtgaggtctttcgtcctgtta

SEQ ID NO: 129638 - DNA, 25 bp, Homo sapien
tgaagtgaggtcattcgtcctgtta

SEQ ID NO: 129639 - DNA, 25 bp, Homo sapien
ggtctaaggtattaagcgtttgtat

SEQ ID NO: 129640 - DNA, 25 bp, Homo sapien
ggtctaaggtataaagcgtttgtat

SEQ ID NO: 129641 - DNA, 25 bp, Homo sapien
atccctcatcaaacgggtcctgtct

SEQ ID NO: 129642 - DNA, 25 bp, Homo sapien
atccctcatcaatcgggtcctgtct

SEQ ID NO: 129643 - DNA, 25 bp, Homo sapien
atgacgaggaacaactctttttgtc

SEQ ID NO: 129644 - DNA, 25 bp, Homo sapien
atgacgaggaactactctttttgtc

SEQ ID NO: 129645 - DNA, 25 bp, Homo sapien
ctcggggagacgactacttccttgg

SEQ ID NO: 129646 - DNA, 25 bp, Homo sapien
ctcggggagacgtctacttccttgg

SEQ ID NO: 129647 - DNA, 25 bp, Homo sapien
acgaggaaacggttcgagattggtc

SEQ ID NO: 129648 - DNA, 25 bp, Homo sapien
acgaggaaacggatcgagattggtc

SEQ ID NO: 129649 - DNA, 25 bp, Homo sapien
atgttgtgactcgataaatgttacc

SEQ ID NO: 129650 - DNA, 25 bp, Homo sapien
atgttgtgactccataaatgttacc

SEQ ID NO: 129651 - DNA, 25 bp, Homo sapien
tttgtcccgtactcttactaagtgt

SEQ ID NO: 129652 - DNA, 25 bp, Homo sapien
tttgtcccgtacacttactaagtgt

SEQ ID NO: 129653 - DNA, 25 bp, Homo sapien
ggttccttgtcctcgacctttattt

SEQ ID NO: 129654 - DNA, 25 bp, Homo sapien
ggttccttgtccacgacctttattt

SEQ ID NO: 129655 - DNA, 25 bp, Homo sapien
gttcccatcagtgaacaacctttcg

SEQ ID NO: 129656 - DNA, 25 bp, Homo sapien
gttcccatcagtcaacaacctttcg

SEQ ID NO: 129657 - DNA, 25 bp, Homo sapien
tgtcaaattccgaaccgagacttga

SEQ ID NO: 129658 - DNA, 25 bp, Homo sapien
tgtcaaattccgtaccgagacttga

SEQ ID NO: 129659 - DNA, 25 bp, Homo sapien
caataggtctcgtcgaaagtgaagt

SEQ ID NO: 129660 - DNA, 25 bp, Homo sapien
caataggtctcgacgaaagtgaagt

SEQ ID NO: 129661 - DNA, 25 bp, Homo sapien
tttaggtaaggtatcgaaacttcac

SEQ ID NO: 129662 - DNA, 25 bp, Homo sapien
tttaggtaaggtttcgaaacttcac

SEQ ID NO: 129663 - DNA, 25 bp, Homo sapien
ctgtctttattggtacaaactcctg

SEQ ID NO: 129664 - DNA, 25 bp, Homo sapien
ctgtctttattgctacaaactcctg

SEQ ID NO: 129665 - DNA, 25 bp, Homo sapien
gaccttaaggtctaccacgcgagtc

SEQ ID NO: 129666 - DNA, 25 bp, Homo sapien
gaccttaaggtcaaccacgcgagtc

SEQ ID NO: 129667 - DNA, 25 bp, Homo sapien
taggtacacccgatgccacactgtc

SEQ ID NO: 129668 - DNA, 25 bp, Homo sapien
taggtacacccgttgccacactgtc

SEQ ID NO: 129669 - DNA, 25 bp, Homo sapien
ttggtgactggagtccgagacgtcc

SEQ ID NO: 129670 - DNA, 25 bp, Homo sapien
ttggtgactggactccgagacgtcc

SEQ ID NO: 129671 - DNA, 25 bp, Homo sapien
accgtatctggacgaacagatacct

SEQ ID NO: 129672 - DNA, 25 bp, Homo sapien
accgtatctggaggaacagatacct

SEQ ID NO: 129673 - DNA, 25 bp, Homo sapien
ttctctcgtgacagagtaaacacat

SEQ ID NO: 129674 - DNA, 25 bp, Homo sapien
ttctctcgtgactgagtaaacacat

SEQ ID NO: 129675 - DNA, 25 bp, Homo sapien
gacgttttttagttcaaaacgacat

SEQ ID NO: 129676 - DNA, 25 bp, Homo sapien
gacgttttttagatcaaaacgacat

SEQ ID NO: 129677 - DNA, 25 bp, Homo sapien
gttcgttctttgtcaccaggtactt

SEQ ID NO: 129678 - DNA, 25 bp, Homo sapien
gttcgttctttgacaccaggtactt

SEQ ID NO: 129679 - DNA, 25 bp, Homo sapien
tccctttccggagggtaccggttct

SEQ ID NO: 129680 - DNA, 25 bp, Homo sapien
tccctttccggacggtaccggttct

SEQ ID NO: 129681 - DNA, 25 bp, Homo sapien
acgtgtttgaggaagtcactcagga

SEQ ID NO: 129682 - DNA, 25 bp, Homo sapien
acgtgtttgaggtagtcactcagga

SEQ ID NO: 129683 - DNA, 25 bp, Homo sapien
ccacttttgtgtctatcatataaca

SEQ ID NO: 129684 - DNA, 25 bp, Homo sapien
ccacttttgtgtgtatcatataaca

SEQ ID NO: 129685 - DNA, 25 bp, Homo sapien
cgagatgccgacacggagtaagtaa

SEQ ID NO: 129686 - DNA, 25 bp, Homo sapien
cgagatgccgactcggagtaagtaa

SEQ ID NO: 129687 - DNA, 25 bp, Homo sapien
acgtttaccacttcgagagataaca

SEQ ID NO: 129688 - DNA, 25 bp, Homo sapien
acgtttaccactacgagagataaca

SEQ ID NO: 129689 - DNA, 25 bp, Homo sapien
cagttagaccaacagagcttctacg

SEQ ID NO: 129690 - DNA, 25 bp, Homo sapien
cagttagaccaagagagcttctacg

SEQ ID NO: 129691 - DNA, 25 bp, Homo sapien
cggtatcgcgacacgacgggtctcc

SEQ ID NO: 129692 - DNA, 25 bp, Homo sapien
cggtatcgcgactcgacgggtctcc

SEQ ID NO: 129693 - DNA, 25 bp, Homo sapien
gagtgtgatcactcgacacggttca

SEQ ID NO: 129694 - DNA, 25 bp, Homo sapien
gagtgtgatcacacgacacggttca

SEQ ID NO: 129695 - DNA, 25 bp, Homo sapien
ggttaaagcttcagacgtcgttcct

SEQ ID NO: 129696 - DNA, 25 bp, Homo sapien
ggttaaagcttctgacgtcgttcct

SEQ ID NO: 129697 - DNA, 25 bp, Homo sapien
cgataccactgacgactcgtcccgt

SEQ ID NO: 129698 - DNA, 25 bp, Homo sapien
cgataccactgaggactcgtcccgt

SEQ ID NO: 129699 - DNA, 25 bp, Homo sapien
ggggtgattgtacgaagtattccct

SEQ ID NO: 129700 - DNA, 25 bp, Homo sapien
ggggtgattgtaggaagtattccct

SEQ ID NO: 129701 - DNA, 25 bp, Homo sapien
gggactttacggtacacatctctcg

SEQ ID NO: 129702 - DNA, 25 bp, Homo sapien
gggactttacggaacacatctctcg

SEQ ID NO: 129703 - DNA, 25 bp, Homo sapien
tttgatgattgtagaaatcactctc

SEQ ID NO: 129704 - DNA, 25 bp, Homo sapien
tttgatgattgttgaaatcactctc

SEQ ID NO: 129705 - DNA, 25 bp, Homo sapien
tttgagagcaccttcactgcggaaa

SEQ ID NO: 129706 - DNA, 25 bp, Homo sapien
tttgagagcaccatcactgcggaaa

SEQ ID NO: 129707 - DNA, 25 bp, Homo sapien
ttagagaactaaattagtcccgaaa

SEQ ID NO: 129708 - DNA, 25 bp, Homo sapien
ttagagaactaatttagtcccgaaa

SEQ ID NO: 129709 - DNA, 25 bp, Homo sapien
gagtcaacattctagacaagtatct

SEQ ID NO: 129710 - DNA, 25 bp, Homo sapien
gagtcaacattcaagacaagtatct

SEQ ID NO: 129711 - DNA, 25 bp, Homo sapien
ccttgttcccacacaaggagtaata

SEQ ID NO: 129712 - DNA, 25 bp, Homo sapien
ccttgttcccactcaaggagtaata

SEQ ID NO: 129713 - DNA, 25 bp, Homo sapien
ttgtgtccttactccacgagaatga

SEQ ID NO: 129714 - DNA, 25 bp, Homo sapien
ttgtgtccttacaccacgagaatga

SEQ ID NO: 129715 - DNA, 25 bp, Homo sapien
cttgactctaatcgtcaggatacaa

SEQ ID NO: 129716 - DNA, 25 bp, Homo sapien
cttgactctaatggtcaggatacaa

SEQ ID NO: 129717 - DNA, 25 bp, Homo sapien
aacgtatccatttgtgtaaatcagt

SEQ ID NO: 129718 - DNA, 25 bp, Homo sapien
aacgtatccattagtgtaaatcagt

SEQ ID NO: 129719 - DNA, 25 bp, Homo sapien
gagactaccatagagactcttatga

SEQ ID NO: 129720 - DNA, 25 bp, Homo sapien
gagactaccatacagactcttatga

SEQ ID NO: 129721 - DNA, 25 bp, Homo sapien
accgtagtccaggagaccttgtgtc

SEQ ID NO: 129722 - DNA, 25 bp, Homo sapien
accgtagtccagcagaccttgtgtc

SEQ ID NO: 129723 - DNA, 25 bp, Homo sapien
tgggagtgttcaacccatgtcaaat

SEQ ID NO: 129724 - DNA, 25 bp, Homo sapien
tgggagtgttcatcccatgtcaaat

SEQ ID NO: 129725 - DNA, 25 bp, Homo sapien
ggactttctgtatccattgtataat

SEQ ID NO: 129726 - DNA, 25 bp, Homo sapien
ggactttctgtaaccattgtataat

SEQ ID NO: 129727 - DNA, 25 bp, Homo sapien
cattcctcgtatgacacgggtaaat

SEQ ID NO: 129728 - DNA, 25 bp, Homo sapien
cattcctcgtatcacacgggtaaat

SEQ ID NO: 129729 - DNA, 25 bp, Homo sapien
acaagtcccttcgacggtgttcact

SEQ ID NO: 129730 - DNA, 25 bp, Homo sapien
acaagtcccttccacggtgttcact

SEQ ID NO: 129731 - DNA, 25 bp, Homo sapien
tcttaattcccttttaggtggtcat

SEQ ID NO: 129732 - DNA, 25 bp, Homo sapien
tcttaattccctattaggtggtcat

SEQ ID NO: 129733 - DNA, 25 bp, Homo sapien
aagtgaatcccgtcgtgactaggaa

SEQ ID NO: 129734 - DNA, 25 bp, Homo sapien
aagtgaatcccgacgtgactaggaa

SEQ ID NO: 129735 - DNA, 25 bp, Homo sapien
ttaggaaacaacacgtaactcaaag

SEQ ID NO: 129736 - DNA, 25 bp, Homo sapien
ttaggaaacaactcgtaactcaaag

SEQ ID NO: 129737 - DNA, 25 bp, Homo sapien
agacaacaacggtcgttagtcaaat

SEQ ID NO: 129738 - DNA, 25 bp, Homo sapien
agacaacaacggacgttagtcaaat

SEQ ID NO: 129739 - DNA, 25 bp, Homo sapien
taaaaggaacggacgtaacctacaa

SEQ ID NO: 129740 - DNA, 25 bp, Homo sapien
taaaaggaacggtcgtaacctacaa

SEQ ID NO: 129741 - DNA, 25 bp, Homo sapien
aaggcgagagatatacataatcaca

SEQ ID NO: 129742 - DNA, 25 bp, Homo sapien
aaggcgagagatttacataatcaca

SEQ ID NO: 129743 - DNA, 25 bp, Homo sapien
gacgagctgaggagtattcctaaga

SEQ ID NO: 129744 - DNA, 25 bp, Homo sapien
gacgagctgaggtgtattcctaaga

SEQ ID NO: 129745 - DNA, 25 bp, Homo sapien
ggtcttcgttgacctgctatagacg

SEQ ID NO: 129746 - DNA, 25 bp, Homo sapien
ggtcttcgttgagctgctatagacg

SEQ ID NO: 129747 - DNA, 25 bp, Homo sapien
ggggtcgtctttgtcgtccagagtc

SEQ ID NO: 129748 - DNA, 25 bp, Homo sapien
ggggtcgtctttctcgtccagagtc

SEQ ID NO: 129749 - DNA, 25 bp, Homo sapien
cggaggtccttttcggcggtcgctc

SEQ ID NO: 129750 - DNA, 25 bp, Homo sapien
cggaggtcctttacggcggtcgctc

SEQ ID NO: 129751 - DNA, 25 bp, Homo sapien
cggatacctttgtcgcggcgcgtgt

SEQ ID NO: 129752 - DNA, 25 bp, Homo sapien
cggatacctttgacgcggcgcgtgt

SEQ ID NO: 129753 - DNA, 25 bp, Homo sapien
gtgactccttcttcagcggtcctcg

SEQ ID NO: 129754 - DNA, 25 bp, Homo sapien
gtgactccttctacagcggtcctcg

SEQ ID NO: 129755 - DNA, 25 bp, Homo sapien
tctatccataggacccgtacgagtg

SEQ ID NO: 129756 - DNA, 25 bp, Homo sapien
tctatccataggtcccgtacgagtg

SEQ ID NO: 129757 - DNA, 25 bp, Homo sapien
tctataaagtggttcctagacgtca

SEQ ID NO: 129758 - DNA, 25 bp, Homo sapien
tctataaagtggatcctagacgtca

SEQ ID NO: 129759 - DNA, 25 bp, Homo sapien
ctgtagagagatacagtttgaccga

SEQ ID NO: 129760 - DNA, 25 bp, Homo sapien
ctgtagagagattcagtttgaccga

SEQ ID NO: 129761 - DNA, 25 bp, Homo sapien
tgtgactatcattacgtaaacttga

SEQ ID NO: 129762 - DNA, 25 bp, Homo sapien
tgtgactatcataacgtaaacttga

SEQ ID NO: 129763 - DNA, 25 bp, Homo sapien
ccgtcgacccactgaaagagtatcc

SEQ ID NO: 129764 - DNA, 25 bp, Homo sapien
ccgtcgacccacagaaagagtatcc

SEQ ID NO: 129765 - DNA, 25 bp, Homo sapien
aatgtcttcccgaactttgtatgtc

SEQ ID NO: 129766 - DNA, 25 bp, Homo sapien
aatgtcttcccgtactttgtatgtc

SEQ ID NO: 129767 - DNA, 25 bp, Homo sapien
ggtcgtaaagtctaatatctattcg

SEQ ID NO: 129768 - DNA, 25 bp, Homo sapien
ggtcgtaaagtcaaatatctattcg

SEQ ID NO: 129769 - DNA, 25 bp, Homo sapien
acacagacacacatatgtcgttacg

SEQ ID NO: 129770 - DNA, 25 bp, Homo sapien
acacagacacacttatgtcgttacg

SEQ ID NO: 129771 - DNA, 25 bp, Homo sapien
ccgacagaccgaagtgtcgtgacag

SEQ ID NO: 129772 - DNA, 25 bp, Homo sapien
ccgacagaccgatgtgtcgtgacag

SEQ ID NO: 129773 - DNA, 25 bp, Homo sapien
gggctgctgaagagtccgcgactag

SEQ ID NO: 129774 - DNA, 25 bp, Homo sapien
gggctgctgaagtgtccgcgactag

SEQ ID NO: 129775 - DNA, 25 bp, Homo sapien
cctaccgtcggtgtttcccgcgatg

SEQ ID NO: 129776 - DNA, 25 bp, Homo sapien
cctaccgtcggtctttcccgcgatg

SEQ ID NO: 129777 - DNA, 25 bp, Homo sapien
ccccactgtgattgctccgacgatg

SEQ ID NO: 129778 - DNA, 25 bp, Homo sapien
ccccactgtgatagctccgacgatg

SEQ ID NO: 129779 - DNA, 25 bp, Homo sapien
agcccggctcggtcctcgcgcagaa

SEQ ID NO: 129780 - DNA, 25 bp, Homo sapien
agcccggctcggacctcgcgcagaa

SEQ ID NO: 129781 - DNA, 25 bp, Homo sapien
gcgtccatccacgacttctcaaagg

SEQ ID NO: 129782 - DNA, 25 bp, Homo sapien
gcgtccatccaccacttctcaaagg

SEQ ID NO: 129783 - DNA, 25 bp, Homo sapien
cccctagaacttcttgttctggaga

SEQ ID NO: 129784 - DNA, 25 bp, Homo sapien
cccctagaacttgttgttctggaga

SEQ ID NO: 129785 - DNA, 25 bp, Homo sapien
tccaagggaggttgtgtttcaatac

SEQ ID NO: 129786 - DNA, 25 bp, Homo sapien
tccaagggaggtagtgtttcaatac

SEQ ID NO: 129787 - DNA, 25 bp, Homo sapien
taccgaggaggtaagtgtaaccaaa

SEQ ID NO: 129788 - DNA, 25 bp, Homo sapien
taccgaggaggttagtgtaaccaaa

SEQ ID NO: 129789 - DNA, 25 bp, Homo sapien
agcttcgaggaaccatctaaagact

SEQ ID NO: 129790 - DNA, 25 bp, Homo sapien
agcttcgaggaagcatctaaagact

SEQ ID NO: 129791 - DNA, 25 bp, Homo sapien
agtctccgaaggtcgagtcatttct

SEQ ID NO: 129792 - DNA, 25 bp, Homo sapien
agtctccgaaggacgagtcatttct

SEQ ID NO: 129793 - DNA, 25 bp, Homo sapien
gagagtcaatgaaacggtctatttc

SEQ ID NO: 129794 - DNA, 25 bp, Homo sapien
gagagtcaatgatacggtctatttc

SEQ ID NO: 129795 - DNA, 25 bp, Homo sapien
acgttaaaccggttagatttctgag

SEQ ID NO: 129796 - DNA, 25 bp, Homo sapien
acgttaaaccggatagatttctgag

SEQ ID NO: 129797 - DNA, 25 bp, Homo sapien
gtgtattccggaacgactgtccaat

SEQ ID NO: 129798 - DNA, 25 bp, Homo sapien
gtgtattccggatcgactgtccaat

SEQ ID NO: 129799 - DNA, 25 bp, Homo sapien
ctctgacgcatggactactaatcaa

SEQ ID NO: 129800 - DNA, 25 bp, Homo sapien
ctctgacgcatgcactactaatcaa

SEQ ID NO: 129801 - DNA, 25 bp, Homo sapien
ctcgagcgccggtatcgcgacacga

SEQ ID NO: 129802 - DNA, 25 bp, Homo sapien
ctcgagcgccggaatcgcgacacga

SEQ ID NO: 129803 - DNA, 25 bp, Homo sapien
tccgacggaccactctaggacgtcc

SEQ ID NO: 129804 - DNA, 25 bp, Homo sapien
tccgacggaccagtctaggacgtcc

SEQ ID NO: 129805 - DNA, 25 bp, Homo sapien
taccacatagaagtaccgtctcctc

SEQ ID NO: 129806 - DNA, 25 bp, Homo sapien
taccacatagaactaccgtctcctc

SEQ ID NO: 129807 - DNA, 25 bp, Homo sapien
ggtcggagggatgcttcgtctgtcc

SEQ ID NO: 129808 - DNA, 25 bp, Homo sapien
ggtcggagggatccttcgtctgtcc

SEQ ID NO: 129809 - DNA, 25 bp, Homo sapien
acgtatccgggtcacccaagtcaaa

SEQ ID NO: 129810 - DNA, 25 bp, Homo sapien
acgtatccgggtgacccaagtcaaa

SEQ ID NO: 129811 - DNA, 25 bp, Homo sapien
acggccgtctactctttaaggtaaa

SEQ ID NO: 129812 - DNA, 25 bp, Homo sapien
acggccgtctacactttaaggtaaa

SEQ ID NO: 129813 - DNA, 25 bp, Homo sapien
agtgtaccttaggattttccaagcg

SEQ ID NO: 129814 - DNA, 25 bp, Homo sapien
agtgtaccttagcattttccaagcg

SEQ ID NO: 129815 - DNA, 25 bp, Homo sapien
agtgcttctccctgacttccaagtt

SEQ ID NO: 129816 - DNA, 25 bp, Homo sapien
agtgcttctcccagacttccaagtt

SEQ ID NO: 129817 - DNA, 25 bp, Homo sapien
actggctctcacaatactaataggt

SEQ ID NO: 129818 - DNA, 25 bp, Homo sapien
actggctctcactatactaataggt

SEQ ID NO: 129819 - DNA, 25 bp, Homo sapien
aaagagtccgtgtcactacgggaag

SEQ ID NO: 129820 - DNA, 25 bp, Homo sapien
aaagagtccgtgacactacgggaag

SEQ ID NO: 129821 - DNA, 25 bp, Homo sapien
gacaatgtactggtgtcagaagaca

SEQ ID NO: 129822 - DNA, 25 bp, Homo sapien
gacaatgtactgctgtcagaagaca

SEQ ID NO: 129823 - DNA, 25 bp, Homo sapien
acggtaggtccctgacgataagaca

SEQ ID NO: 129824 - DNA, 25 bp, Homo sapien
acggtaggtcccagacgataagaca

SEQ ID NO: 129825 - DNA, 25 bp, Homo sapien
agggaggcagagacgactccctcgt

SEQ ID NO: 129826 - DNA, 25 bp, Homo sapien
agggaggcagagtcgactccctcgt

SEQ ID NO: 129827 - DNA, 25 bp, Homo sapien
aaggtcgcgaatatcgccagctact

SEQ ID NO: 129828 - DNA, 25 bp, Homo sapien
aaggtcgcgaatttcgccagctact

SEQ ID NO: 129829 - DNA, 25 bp, Homo sapien
aactgcatcgactacgtccacgtca

SEQ ID NO: 129830 - DNA, 25 bp, Homo sapien
aactgcatcgacaacgtccacgtca

SEQ ID NO: 129831 - DNA, 25 bp, Homo sapien
tcgacaaccgtatcccgtcgcggtg

SEQ ID NO: 129832 - DNA, 25 bp, Homo sapien
tcgacaaccgtaacccgtcgcggtg

SEQ ID NO: 129833 - DNA, 25 bp, Homo sapien
gtacactgaccacaccgtcgagtga

SEQ ID NO: 129834 - DNA, 25 bp, Homo sapien
gtacactgaccagaccgtcgagtga

SEQ ID NO: 129835 - DNA, 25 bp, Homo sapien
tcgtacttatcaagtcctacggaaa

SEQ ID NO: 129836 - DNA, 25 bp, Homo sapien
tcgtacttatcatgtcctacggaaa

SEQ ID NO: 129837 - DNA, 25 bp, Homo sapien
aactgtttttgatcggtggttctca

SEQ ID NO: 129838 - DNA, 25 bp, Homo sapien
aactgtttttgaacggtggttctca

SEQ ID NO: 129839 - DNA, 25 bp, Homo sapien
accaccgatacttgggtctccagca

SEQ ID NO: 129840 - DNA, 25 bp, Homo sapien
accaccgatactagggtctccagca

SEQ ID NO: 129841 - DNA, 25 bp, Homo sapien
actcccgagtaggtgtcccgagcgg

SEQ ID NO: 129842 - DNA, 25 bp, Homo sapien
actcccgagtagctgtcccgagcgg

SEQ ID NO: 129843 - DNA, 25 bp, Homo sapien
taaccacgaagaagtcacacagaga

SEQ ID NO: 129844 - DNA, 25 bp, Homo sapien
taaccacgaagatgtcacacagaga

SEQ ID NO: 129845 - DNA, 25 bp, Homo sapien
tcaccggatgtcagacacagtagaa

SEQ ID NO: 129846 - DNA, 25 bp, Homo sapien
tcaccggatgtctgacacagtagaa

SEQ ID NO: 129847 - DNA, 25 bp, Homo sapien
catgagtagttctcatagacgagct

SEQ ID NO: 129848 - DNA, 25 bp, Homo sapien
catgagtagttcacatagacgagct

SEQ ID NO: 129849 - DNA, 25 bp, Homo sapien
cgtcgctagtcacgtggctaaacga

SEQ ID NO: 129850 - DNA, 25 bp, Homo sapien
cgtcgctagtcaggtggctaaacga

SEQ ID NO: 129851 - DNA, 25 bp, Homo sapien
aggaaaacgtggtccggtacgaatg

SEQ ID NO: 129852 - DNA, 25 bp, Homo sapien
aggaaaacgtggaccggtacgaatg

SEQ ID NO: 129853 - DNA, 25 bp, Homo sapien
gtcaaatgtcggtaatctactattt

SEQ ID NO: 129854 - DNA, 25 bp, Homo sapien
gtcaaatgtcggaaatctactattt

SEQ ID NO: 129855 - DNA, 25 bp, Homo sapien
cggacagtacagcattacaacttac

SEQ ID NO: 129856 - DNA, 25 bp, Homo sapien
cggacagtacaggattacaacttac

SEQ ID NO: 129857 - DNA, 25 bp, Homo sapien
gcgcaacgagtgttacaagtacctc

SEQ ID NO: 129858 - DNA, 25 bp, Homo sapien
gcgcaacgagtgatacaagtacctc

SEQ ID NO: 129859 - DNA, 25 bp, Homo sapien
aaaggtaaccgttctattgttactt

SEQ ID NO: 129860 - DNA, 25 bp, Homo sapien
aaaggtaaccgtactattgttactt

SEQ ID NO: 129861 - DNA, 25 bp, Homo sapien
gaatgtacacactacaaagtctcga

SEQ ID NO: 129862 - DNA, 25 bp, Homo sapien
gaatgtacacacaacaaagtctcga

SEQ ID NO: 129863 - DNA, 25 bp, Homo sapien
acagaggaggaagaacgacccgaca

SEQ ID NO: 129864 - DNA, 25 bp, Homo sapien
acagaggaggaacaacgacccgaca

SEQ ID NO: 129865 - DNA, 25 bp, Homo sapien
aggtcgaggaggagtcgccactcta

SEQ ID NO: 129866 - DNA, 25 bp, Homo sapien
aggtcgaggaggtgtcgccactcta

SEQ ID NO: 129867 - DNA, 25 bp, Homo sapien
gagtatcgacgaaggtgggtcaccc

SEQ ID NO: 129868 - DNA, 25 bp, Homo sapien
gagtatcgacgatggtgggtcaccc

SEQ ID NO: 129869 - DNA, 25 bp, Homo sapien
agtctccggaagtcgggacgtacca

SEQ ID NO: 129870 - DNA, 25 bp, Homo sapien
agtctccggaagacgggacgtacca

SEQ ID NO: 129871 - DNA, 25 bp, Homo sapien
tgttccggaactaccgtcatccgta

SEQ ID NO: 129872 - DNA, 25 bp, Homo sapien
tgttccggaacttccgtcatccgta

SEQ ID NO: 129873 - DNA, 25 bp, Homo sapien
tctttactggtttcacacaacacgg

SEQ ID NO: 129874 - DNA, 25 bp, Homo sapien
tctttactggttacacacaacacgg

SEQ ID NO: 129875 - DNA, 25 bp, Homo sapien
cacacctgcacgtacacgaagaagg

SEQ ID NO: 129876 - DNA, 25 bp, Homo sapien
cacacctgcacgaacacgaagaagg

SEQ ID NO: 129877 - DNA, 25 bp, Homo sapien
ccatgtgtcagttggacagtaacag

SEQ ID NO: 129878 - DNA, 25 bp, Homo sapien
ccatgtgtcagtaggacagtaacag

SEQ ID NO: 129879 - DNA, 25 bp, Homo sapien
tcattgtgtcttagaaagtcacagt

SEQ ID NO: 129880 - DNA, 25 bp, Homo sapien
tcattgtgtctttgaaagtcacagt

SEQ ID NO: 129881 - DNA, 25 bp, Homo sapien
cagtctggtggcaccgtacgcaagt

SEQ ID NO: 129882 - DNA, 25 bp, Homo sapien
cagtctggtggctccgtacgcaagt

SEQ ID NO: 129883 - DNA, 25 bp, Homo sapien
gagagtgtaggaaacctacaaacgt

SEQ ID NO: 129884 - DNA, 25 bp, Homo sapien
gagagtgtaggatacctacaaacgt

SEQ ID NO: 129885 - DNA, 25 bp, Homo sapien
tgtagagatacaatttactccatgt

SEQ ID NO: 129886 - DNA, 25 bp, Homo sapien
tgtagagatacattttactccatgt

SEQ ID NO: 129887 - DNA, 25 bp, Homo sapien
gctgtgtgtcacgttttaccctctc

SEQ ID NO: 129888 - DNA, 25 bp, Homo sapien
gctgtgtgtcaccttttaccctctc

SEQ ID NO: 129889 - DNA, 25 bp, Homo sapien
ttacatgtcgtctttaacctgtccg

SEQ ID NO: 129890 - DNA, 25 bp, Homo sapien
ttacatgtcgtcattaacctgtccg

SEQ ID NO: 129891 - DNA, 25 bp, Homo sapien
ttcaactcgtgtcctatacttgtcc

SEQ ID NO: 129892 - DNA, 25 bp, Homo sapien
ttcaactcgtgtgctatacttgtcc

SEQ ID NO: 129893 - DNA, 25 bp, Homo sapien
ttctacttatgttttgagggtccgt

SEQ ID NO: 129894 - DNA, 25 bp, Homo sapien
ttctacttatgtattgagggtccgt

SEQ ID NO: 129895 - DNA, 25 bp, Homo sapien
tgtctacttaatgtttaaccgtcga

SEQ ID NO: 129896 - DNA, 25 bp, Homo sapien
tgtctacttaatctttaaccgtcga

SEQ ID NO: 129897 - DNA, 25 bp, Homo sapien
gagtaccgattattcactaccgtca

SEQ ID NO: 129898 - DNA, 25 bp, Homo sapien
gagtaccgattaatcactaccgtca

SEQ ID NO: 129899 - DNA, 25 bp, Homo sapien
gagacacctctttcgtcacacgata

SEQ ID NO: 129900 - DNA, 25 bp, Homo sapien
gagacacctcttacgtcacacgata

SEQ ID NO: 129901 - DNA, 25 bp, Homo sapien
acacgacaccactcgatccgggagt

SEQ ID NO: 129902 - DNA, 25 bp, Homo sapien
acacgacaccacacgatccgggagt

SEQ ID NO: 129903 - DNA, 25 bp, Homo sapien
accagacctctaacatcgtgggtgt

SEQ ID NO: 129904 - DNA, 25 bp, Homo sapien
accagacctctatcatcgtgggtgt

SEQ ID NO: 129905 - DNA, 25 bp, Homo sapien
gaacatacctcttatatgtggtctt

SEQ ID NO: 129906 - DNA, 25 bp, Homo sapien
gaacatacctctaatatgtggtctt

SEQ ID NO: 129907 - DNA, 25 bp, Homo sapien
ccgacgtcggactactctcggtcga

SEQ ID NO: 129908 - DNA, 25 bp, Homo sapien
ccgacgtcggacaactctcggtcga

SEQ ID NO: 129909 - DNA, 25 bp, Homo sapien
cacggaacacggtcagaccggggtc

SEQ ID NO: 129910 - DNA, 25 bp, Homo sapien
cacggaacacggacagaccggggtc

SEQ ID NO: 129911 - DNA, 25 bp, Homo sapien
accggtgaccggacccgtgcaggac

SEQ ID NO: 129912 - DNA, 25 bp, Homo sapien
accggtgaccggtcccgtgcaggac

SEQ ID NO: 129913 - DNA, 25 bp, Homo sapien
tctggaaggttcctctccgggacct

SEQ ID NO: 129914 - DNA, 25 bp, Homo sapien
tctggaaggttcgtctccgggacct

SEQ ID NO: 129915 - DNA, 25 bp, Homo sapien
tggaccgagttcagtatctacccca

SEQ ID NO: 129916 - DNA, 25 bp, Homo sapien
tggaccgagttctgtatctacccca

SEQ ID NO: 129917 - DNA, 25 bp, Homo sapien
ggaccggtctcttctattacttcta

SEQ ID NO: 129918 - DNA, 25 bp, Homo sapien
ggaccggtctctactattacttcta

SEQ ID NO: 129919 - DNA, 25 bp, Homo sapien
ccgagaaccttcacttgtacgtttg

SEQ ID NO: 129920 - DNA, 25 bp, Homo sapien
ccgagaaccttctcttgtacgtttg

SEQ ID NO: 129921 - DNA, 25 bp, Homo sapien
gaaatcgttagacgaggagttctac

SEQ ID NO: 129922 - DNA, 25 bp, Homo sapien
gaaatcgttagaggaggagttctac

SEQ ID NO: 129923 - DNA, 25 bp, Homo sapien
cttcggtgacgagtcgacgagttac

SEQ ID NO: 129924 - DNA, 25 bp, Homo sapien
cttcggtgacgactcgacgagttac

SEQ ID NO: 129925 - DNA, 25 bp, Homo sapien
cccggtcggtgcagagacgtaccgt

SEQ ID NO: 129926 - DNA, 25 bp, Homo sapien
cccggtcggtgctgagacgtaccgt

SEQ ID NO: 129927 - DNA, 25 bp, Homo sapien
tccctagagtcttacggaagtcttg

SEQ ID NO: 129928 - DNA, 25 bp, Homo sapien
tccctagagtctaacggaagtcttg

SEQ ID NO: 129929 - DNA, 25 bp, Homo sapien
ttcgggatatctaaggagttaccgt

SEQ ID NO: 129930 - DNA, 25 bp, Homo sapien
ttcgggatatcttaggagttaccgt

SEQ ID NO: 129931 - DNA, 25 bp, Homo sapien
cgtctaggcttcataggtgatactg

SEQ ID NO: 129932 - DNA, 25 bp, Homo sapien
cgtctaggcttcttaggtgatactg

SEQ ID NO: 129933 - DNA, 25 bp, Homo sapien
aactattccctttcggttgttaccg

SEQ ID NO: 129934 - DNA, 25 bp, Homo sapien
aactattcccttacggttgttaccg

SEQ ID NO: 129935 - DNA, 25 bp, Homo sapien
gagaccatgtgttccccttttgtgt

SEQ ID NO: 129936 - DNA, 25 bp, Homo sapien
gagaccatgtgtaccccttttgtgt

SEQ ID NO: 129937 - DNA, 25 bp, Homo sapien
ggagaccctccgtcctgtttcttga

SEQ ID NO: 129938 - DNA, 25 bp, Homo sapien
ggagaccctccgacctgtttcttga

SEQ ID NO: 129939 - DNA, 25 bp, Homo sapien
gtgttcctctcgtccaatattttga

SEQ ID NO: 129940 - DNA, 25 bp, Homo sapien
gtgttcctctcgaccaatattttga

SEQ ID NO: 129941 - DNA, 25 bp, Homo sapien
aacactgaagaatcacttcgtaaag

SEQ ID NO: 129942 - DNA, 25 bp, Homo sapien
aacactgaagaaacacttcgtaaag

SEQ ID NO: 129943 - DNA, 25 bp, Homo sapien
caaagtcggacaaactgacgtaata

SEQ ID NO: 129944 - DNA, 25 bp, Homo sapien
caaagtcggacatactgacgtaata

SEQ ID NO: 129945 - DNA, 25 bp, Homo sapien
caagattagaagactcgacggaaac

SEQ ID NO: 129946 - DNA, 25 bp, Homo sapien
caagattagaagtctcgacggaaac

SEQ ID NO: 129947 - DNA, 25 bp, Homo sapien
cccggtgtttactcccgtgaaacgt

SEQ ID NO: 129948 - DNA, 25 bp, Homo sapien
cccggtgtttacacccgtgaaacgt

SEQ ID NO: 129949 - DNA, 25 bp, Homo sapien
cccgagatcttctgccacgtgaaga

SEQ ID NO: 129950 - DNA, 25 bp, Homo sapien
cccgagatcttcagccacgtgaaga

SEQ ID NO: 129951 - DNA, 25 bp, Homo sapien
ccaaggacttcgattccgtcgacaa

SEQ ID NO: 129952 - DNA, 25 bp, Homo sapien
ccaaggacttcgtttccgtcgacaa

SEQ ID NO: 129953 - DNA, 25 bp, Homo sapien
agtatatttctgttaccgtgacaat

SEQ ID NO: 129954 - DNA, 25 bp, Homo sapien
agtatatttctgataccgtgacaat

SEQ ID NO: 129955 - DNA, 25 bp, Homo sapien
cattacttctgatcccgtgagaagt

SEQ ID NO: 129956 - DNA, 25 bp, Homo sapien
cattacttctgaacccgtgagaagt

SEQ ID NO: 129957 - DNA, 25 bp, Homo sapien
gactatagtcttatcttcggttact

SEQ ID NO: 129958 - DNA, 25 bp, Homo sapien
gactatagtcttttcttcggttact

SEQ ID NO: 129959 - DNA, 25 bp, Homo sapien
accttcggttacctttcggtctcgt

SEQ ID NO: 129960 - DNA, 25 bp, Homo sapien
accttcggttacgtttcggtctcgt

SEQ ID NO: 129961 - DNA, 25 bp, Homo sapien
ctcttcgtcgtcaggtttcactcct

SEQ ID NO: 129962 - DNA, 25 bp, Homo sapien
ctcttcgtcgtctggtttcactcct

SEQ ID NO: 129963 - DNA, 25 bp, Homo sapien
accgcaaggtctacgttctcccggt

SEQ ID NO: 129964 - DNA, 25 bp, Homo sapien
accgcaaggtcttcgttctcccggt

SEQ ID NO: 129965 - DNA, 25 bp, Homo sapien
caaagagcgagactccttcaggggt

SEQ ID NO: 129966 - DNA, 25 bp, Homo sapien
caaagagcgagagtccttcaggggt

SEQ ID NO: 129967 - DNA, 25 bp, Homo sapien
actacgacggggtctccgacaggga

SEQ ID NO: 129968 - DNA, 25 bp, Homo sapien
actacgacggggactccgacaggga

SEQ ID NO: 129969 - DNA, 25 bp, Homo sapien
gagagtcgaactcacaacgagtaga

SEQ ID NO: 129970 - DNA, 25 bp, Homo sapien
gagagtcgaactgacaacgagtaga

SEQ ID NO: 129971 - DNA, 25 bp, Homo sapien
agggggaactcactatacaaaggta

SEQ ID NO: 129972 - DNA, 25 bp, Homo sapien
agggggaactcagtatacaaaggta

SEQ ID NO: 129973 - DNA, 25 bp, Homo sapien
gggactaacttccgaaacgggtgta

SEQ ID NO: 129974 - DNA, 25 bp, Homo sapien
gggactaacttcggaaacgggtgta

SEQ ID NO: 129975 - DNA, 25 bp, Homo sapien
tggaaaccggttctcaagaggtgac

SEQ ID NO: 129976 - DNA, 25 bp, Homo sapien
tggaaaccggttgtcaagaggtgac

SEQ ID NO: 129977 - DNA, 25 bp, Homo sapien
gttaaaacgtttaccagaaatgtct

SEQ ID NO: 129978 - DNA, 25 bp, Homo sapien
gttaaaacgttttccagaaatgtct

SEQ ID NO: 129979 - DNA, 25 bp, Homo sapien
gtgtccgatacttaacagaaactcc

SEQ ID NO: 129980 - DNA, 25 bp, Homo sapien
gtgtccgatactaaacagaaactcc

SEQ ID NO: 129981 - DNA, 25 bp, Homo sapien
gggttcttcgtctcagtccctccgt

SEQ ID NO: 129982 - DNA, 25 bp, Homo sapien
gggttcttcgtcacagtccctccgt

SEQ ID NO: 129983 - DNA, 25 bp, Homo sapien
ccgaggtttcgacgtggggatctcc

SEQ ID NO: 129984 - DNA, 25 bp, Homo sapien
ccgaggtttcgaggtggggatctcc

SEQ ID NO: 129985 - DNA, 25 bp, Homo sapien
cgtttgtggatatgacgggtttacc

SEQ ID NO: 129986 - DNA, 25 bp, Homo sapien
cgtttgtggataagacgggtttacc

SEQ ID NO: 129987 - DNA, 25 bp, Homo sapien
ggtgtctggggaaaggtcaccctac

SEQ ID NO: 129988 - DNA, 25 bp, Homo sapien
ggtgtctggggataggtcaccctac

SEQ ID NO: 129989 - DNA, 25 bp, Homo sapien
tggtgttaagacagaaagtgccccc

SEQ ID NO: 129990 - DNA, 25 bp, Homo sapien
tggtgttaagactgaaagtgccccc

SEQ ID NO: 129991 - DNA, 25 bp, Homo sapien
acttccgccggtgtcggtccagacg

SEQ ID NO: 129992 - DNA, 25 bp, Homo sapien
acttccgccggtctcggtccagacg

SEQ ID NO: 129993 - DNA, 25 bp, Homo sapien
tcattggtggtgacgactacctcgg

SEQ ID NO: 129994 - DNA, 25 bp, Homo sapien
tcattggtggtgtcgactacctcgg

SEQ ID NO: 129995 - DNA, 25 bp, Homo sapien
cttctttgggtttgtcctccgcgtg

SEQ ID NO: 129996 - DNA, 25 bp, Homo sapien
cttctttgggttagtcctccgcgtg

SEQ ID NO: 129997 - DNA, 25 bp, Homo sapien
gatatttagggcttactggtccttg

SEQ ID NO: 129998 - DNA, 25 bp, Homo sapien
gatatttagggcatactggtccttg

SEQ ID NO: 129999 - DNA, 25 bp, Homo sapien
gattacagtcatgtattgtcactga

SEQ ID NO: 130000 - DNA, 25 bp, Homo sapien
gattacagtcatctattgtcactga

SEQ ID NO: 130001 - DNA, 25 bp, Homo sapien
tcctctcgtgactcttatgacaggg

SEQ ID NO: 130002 - DNA, 25 bp, Homo sapien
tcctctcgtgacacttatgacaggg

SEQ ID NO: 130003 - DNA, 25 bp, Homo sapien
tactcagggactcgttagtcctttg

SEQ ID NO: 130004 - DNA, 25 bp, Homo sapien
tactcagggactggttagtcctttg

SEQ ID NO: 130005 - DNA, 25 bp, Homo sapien
tacctaaatatgtgtgaccttttcg

SEQ ID NO: 130006 - DNA, 25 bp, Homo sapien
tacctaaatatgagtgaccttttcg

SEQ ID NO: 130007 - DNA, 25 bp, Homo sapien
ccgtgatttacgaccacctgtcttc

SEQ ID NO: 130008 - DNA, 25 bp, Homo sapien
ccgtgatttacgtccacctgtcttc

SEQ ID NO: 130009 - DNA, 25 bp, Homo sapien
ctcctggttgagtccacgtccctaa

SEQ ID NO: 130010 - DNA, 25 bp, Homo sapien
ctcctggttgagaccacgtccctaa

SEQ ID NO: 130011 - DNA, 25 bp, Homo sapien
gtcctgctgtaacttctaaccagaa

SEQ ID NO: 130012 - DNA, 25 bp, Homo sapien
gtcctgctgtaagttctaaccagaa

SEQ ID NO: 130013 - DNA, 25 bp, Homo sapien
ccggagtgagagtgtacccaagaga

SEQ ID NO: 130014 - DNA, 25 bp, Homo sapien
ccggagtgagagagtacccaagaga

SEQ ID NO: 130015 - DNA, 25 bp, Homo sapien
tccctagggtagacaccacctaaga

SEQ ID NO: 130016 - DNA, 25 bp, Homo sapien
tccctagggtagtcaccacctaaga

SEQ ID NO: 130017 - DNA, 25 bp, Homo sapien
acacttgaaaccccgaagacgaagt

SEQ ID NO: 130018 - DNA, 25 bp, Homo sapien
acacttgaaaccgcgaagacgaagt

SEQ ID NO: 130019 - DNA, 25 bp, Homo sapien
ccgtcgccgggtaccggaggaacat

SEQ ID NO: 130020 - DNA, 25 bp, Homo sapien
ccgtcgccgggttccggaggaacat

SEQ ID NO: 130021 - DNA, 25 bp, Homo sapien
cctctcggaggcagaggtcgacacc

SEQ ID NO: 130022 - DNA, 25 bp, Homo sapien
cctctcggaggctgaggtcgacacc

SEQ ID NO: 130023 - DNA, 25 bp, Homo sapien
gtcaggcacgcctagacgagcaggt

SEQ ID NO: 130024 - DNA, 25 bp, Homo sapien
gtcaggcacgccaagacgagcaggt

SEQ ID NO: 130025 - DNA, 25 bp, Homo sapien
aaggaggaccctaaacggaggtaga

SEQ ID NO: 130026 - DNA, 25 bp, Homo sapien
aaggaggacccttaacggaggtaga

SEQ ID NO: 130027 - DNA, 25 bp, Homo sapien
gcaagagccgccaagagtcggaaga

SEQ ID NO: 130028 - DNA, 25 bp, Homo sapien
gcaagagccgcctagagtcggaaga

SEQ ID NO: 130029 - DNA, 25 bp, Homo sapien
cggtctcgggtgctcggtaaataac

SEQ ID NO: 130030 - DNA, 25 bp, Homo sapien
cggtctcgggtggtcggtaaataac

SEQ ID NO: 130031 - DNA, 25 bp, Homo sapien
cgtctctaggtcgacggagaaactc

SEQ ID NO: 130032 - DNA, 25 bp, Homo sapien
cgtctctaggtccacggagaaactc

SEQ ID NO: 130033 - DNA, 25 bp, Homo sapien
cgatagtgtcataagacgacatata

SEQ ID NO: 130034 - DNA, 25 bp, Homo sapien
cgatagtgtcattagacgacatata

SEQ ID NO: 130035 - DNA, 25 bp, Homo sapien
aatggtccttataccatcgtagtgt

SEQ ID NO: 130036 - DNA, 25 bp, Homo sapien
aatggtccttattccatcgtagtgt

SEQ ID NO: 130037 - DNA, 25 bp, Homo sapien
cggttgacactttctccagtcgtta

SEQ ID NO: 130038 - DNA, 25 bp, Homo sapien
cggttgacacttactccagtcgtta

SEQ ID NO: 130039 - DNA, 25 bp, Homo sapien
cgggtactttaattcccataggtac

SEQ ID NO: 130040 - DNA, 25 bp, Homo sapien
cgggtactttaaatcccataggtac

SEQ ID NO: 130041 - DNA, 25 bp, Homo sapien
ctcagggttcacacagctccgagga

SEQ ID NO: 130042 - DNA, 25 bp, Homo sapien
ctcagggttcactcagctccgagga

SEQ ID NO: 130043 - DNA, 25 bp, Homo sapien
cagggttacgactctgtctccaata

SEQ ID NO: 130044 - DNA, 25 bp, Homo sapien
cagggttacgacactgtctccaata

SEQ ID NO: 130045 - DNA, 25 bp, Homo sapien
acggtagttcccaaggacttcgaaa

SEQ ID NO: 130046 - DNA, 25 bp, Homo sapien
acggtagttccctaggacttcgaaa

SEQ ID NO: 130047 - DNA, 25 bp, Homo sapien
aattattttctttcgacttaagaag

SEQ ID NO: 130048 - DNA, 25 bp, Homo sapien
aattattttcttacgacttaagaag

SEQ ID NO: 130049 - DNA, 25 bp, Homo sapien
atctcgttttcctttaagacaggtg

SEQ ID NO: 130050 - DNA, 25 bp, Homo sapien
atctcgttttccattaagacaggtg

SEQ ID NO: 130051 - DNA, 25 bp, Homo sapien
gtcactaatacttactcgacactgg

SEQ ID NO: 130052 - DNA, 25 bp, Homo sapien
gtcactaatactaactcgacactgg

SEQ ID NO: 130053 - DNA, 25 bp, Homo sapien
gggaaggaccaggtgaatcccttcg

SEQ ID NO: 130054 - DNA, 25 bp, Homo sapien
gggaaggaccagctgaatcccttcg

SEQ ID NO: 130055 - DNA, 25 bp, Homo sapien
gaggggtcctgaccacttccctgtc

SEQ ID NO: 130056 - DNA, 25 bp, Homo sapien
gaggggtcctgagcacttccctgtc

SEQ ID NO: 130057 - DNA, 25 bp, Homo sapien
gagttttttcgactaaaccactgtt

SEQ ID NO: 130058 - DNA, 25 bp, Homo sapien
gagttttttcgagtaaaccactgtt

SEQ ID NO: 130059 - DNA, 25 bp, Homo sapien
ggatttcaccattcgaaacctatag

SEQ ID NO: 130060 - DNA, 25 bp, Homo sapien
ggatttcaccatacgaaacctatag

SEQ ID NO: 130061 - DNA, 25 bp, Homo sapien
catcagacacgtaccctagaactag

SEQ ID NO: 130062 - DNA, 25 bp, Homo sapien
catcagacacgttccctagaactag

SEQ ID NO: 130063 - DNA, 25 bp, Homo sapien
gttcagtacgggtcgatggtactcg

SEQ ID NO: 130064 - DNA, 25 bp, Homo sapien
gttcagtacgggacgatggtactcg

SEQ ID NO: 130065 - DNA, 25 bp, Homo sapien
gcggagaaggtacagagacgtcacg

SEQ ID NO: 130066 - DNA, 25 bp, Homo sapien
gcggagaaggtagagagacgtcacg

SEQ ID NO: 130067 - DNA, 25 bp, Homo sapien
cttacgtattaactgggaacgtcga

SEQ ID NO: 130068 - DNA, 25 bp, Homo sapien
cttacgtattaagtgggaacgtcga

SEQ ID NO: 130069 - DNA, 25 bp, Homo sapien
ttatcgatattttttggatgtcgtt

SEQ ID NO: 130070 - DNA, 25 bp, Homo sapien
ttatcgatatttattggatgtcgtt

SEQ ID NO: 130071 - DNA, 25 bp, Homo sapien
aaggactttttatgcggctcgtgag

SEQ ID NO: 130072 - DNA, 25 bp, Homo sapien
aaggactttttaagcggctcgtgag

SEQ ID NO: 130073 - DNA, 25 bp, Homo sapien
gcctacggtctctccgcgtatgtgt

SEQ ID NO: 130074 - DNA, 25 bp, Homo sapien
gcctacggtctcaccgcgtatgtgt

SEQ ID NO: 130075 - DNA, 25 bp, Homo sapien
cgactactcccgaggcgtgtcgtgt

SEQ ID NO: 130076 - DNA, 25 bp, Homo sapien
cgactactcccgtggcgtgtcgtgt

SEQ ID NO: 130077 - DNA, 25 bp, Homo sapien
agttctacgtttgtctccgtgttgt

SEQ ID NO: 130078 - DNA, 25 bp, Homo sapien
agttctacgtttctctccgtgttgt

SEQ ID NO: 130079 - DNA, 25 bp, Homo sapien
cattatctattctactgaggttatg

SEQ ID NO: 130080 - DNA, 25 bp, Homo sapien
cattatctattcaactgaggttatg

SEQ ID NO: 130081 - DNA, 25 bp, Homo sapien
acataggaaataagtctgtcaagac

SEQ ID NO: 130082 - DNA, 25 bp, Homo sapien
acataggaaatatgtctgtcaagac

SEQ ID NO: 130083 - DNA, 25 bp, Homo sapien
gactagcaaagaaatcaccacagta

SEQ ID NO: 130084 - DNA, 25 bp, Homo sapien
gactagcaaagatatcaccacagta

SEQ ID NO: 130085 - DNA, 25 bp, Homo sapien
ggaccaggaacatggtcatgtgaaa

SEQ ID NO: 130086 - DNA, 25 bp, Homo sapien
ggaccaggaacaaggtcatgtgaaa

SEQ ID NO: 130087 - DNA, 25 bp, Homo sapien
cgaccaaggtcaaggtttgccgtaa

SEQ ID NO: 130088 - DNA, 25 bp, Homo sapien
cgaccaaggtcatggtttgccgtaa

SEQ ID NO: 130089 - DNA, 25 bp, Homo sapien
caaagggtcaagacatgttcgtctc

SEQ ID NO: 130090 - DNA, 25 bp, Homo sapien
caaagggtcaagtcatgttcgtctc

SEQ ID NO: 130091 - DNA, 25 bp, Homo sapien
ggtggagttcgaaattttccgactc

SEQ ID NO: 130092 - DNA, 25 bp, Homo sapien
ggtggagttcgatattttccgactc

SEQ ID NO: 130093 - DNA, 25 bp, Homo sapien
ggcagaggtaaaatatcttttcctc

SEQ ID NO: 130094 - DNA, 25 bp, Homo sapien
ggcagaggtaaattatcttttcctc

SEQ ID NO: 130095 - DNA, 25 bp, Homo sapien
gtaggattagattcctcgcgtccgg

SEQ ID NO: 130096 - DNA, 25 bp, Homo sapien
gtaggattagatacctcgcgtccgg

SEQ ID NO: 130097 - DNA, 25 bp, Homo sapien
cgtggacgcaaggaccacgcttgtg

SEQ ID NO: 130098 - DNA, 25 bp, Homo sapien
cgtggacgcaagcaccacgcttgtg

SEQ ID NO: 130099 - DNA, 25 bp, Homo sapien
gttaggtgcagacacaaccactaga

SEQ ID NO: 130100 - DNA, 25 bp, Homo sapien
gttaggtgcagagacaaccactaga

SEQ ID NO: 130101 - DNA, 25 bp, Homo sapien
tagtcgtttaaggaagcgacaacac

SEQ ID NO: 130102 - DNA, 25 bp, Homo sapien
tagtcgtttaagcaagcgacaacac

SEQ ID NO: 130103 - DNA, 25 bp, Homo sapien
agtacatggtttacagtgtgaccga

SEQ ID NO: 130104 - DNA, 25 bp, Homo sapien
agtacatggttttcagtgtgaccga

SEQ ID NO: 130105 - DNA, 25 bp, Homo sapien
tctactcgagcttgtgacgggcgga

SEQ ID NO: 130106 - DNA, 25 bp, Homo sapien
tctactcgagctagtgacgggcgga

SEQ ID NO: 130107 - DNA, 25 bp, Homo sapien
gtcactgagtctgtgtcaaaggtag

SEQ ID NO: 130108 - DNA, 25 bp, Homo sapien
gtcactgagtctctgtcaaaggtag

SEQ ID NO: 130109 - DNA, 25 bp, Homo sapien
cgtccagggtctttcgcagacggta

SEQ ID NO: 130110 - DNA, 25 bp, Homo sapien
cgtccagggtctatcgcagacggta

SEQ ID NO: 130111 - DNA, 25 bp, Homo sapien
cccatcggttagacgtctgtctgtg

SEQ ID NO: 130112 - DNA, 25 bp, Homo sapien
cccatcggttagtcgtctgtctgtg

SEQ ID NO: 130113 - DNA, 25 bp, Homo sapien
tccccgatggtcatccttcggtagg

SEQ ID NO: 130114 - DNA, 25 bp, Homo sapien
tccccgatggtcttccttcggtagg

SEQ ID NO: 130115 - DNA, 25 bp, Homo sapien
cgtccactccggtcactgcggtagg

SEQ ID NO: 130116 - DNA, 25 bp, Homo sapien
cgtccactccggacactgcggtagg

SEQ ID NO: 130117 - DNA, 25 bp, Homo sapien
caccggttgagacctgagtctaggt

SEQ ID NO: 130118 - DNA, 25 bp, Homo sapien
caccggttgagagctgagtctaggt

SEQ ID NO: 130119 - DNA, 25 bp, Homo sapien
caccctgtggtcctacgtcgacttt

SEQ ID NO: 130120 - DNA, 25 bp, Homo sapien
caccctgtggtcgtacgtcgacttt

SEQ ID NO: 130121 - DNA, 25 bp, Homo sapien
agagacgatctcgttgttccactcg

SEQ ID NO: 130122 - DNA, 25 bp, Homo sapien
agagacgatctccttgttccactcg

SEQ ID NO: 130123 - DNA, 25 bp, Homo sapien
aaacggagcctactaagtctgctcc

SEQ ID NO: 130124 - DNA, 25 bp, Homo sapien
aaacggagcctagtaagtctgctcc

SEQ ID NO: 130125 - DNA, 25 bp, Homo sapien
gaaggagaccctagaggtctggacc

SEQ ID NO: 130126 - DNA, 25 bp, Homo sapien
gaaggagacccttgaggtctggacc

SEQ ID NO: 130127 - DNA, 25 bp, Homo sapien
aataccaactcactaccgtgcgtcg

SEQ ID NO: 130128 - DNA, 25 bp, Homo sapien
aataccaactcagtaccgtgcgtcg

SEQ ID NO: 130129 - DNA, 25 bp, Homo sapien
tggacgacccgaacacatggggtcc

SEQ ID NO: 130130 - DNA, 25 bp, Homo sapien
tggacgacccgatcacatggggtcc

SEQ ID NO: 130131 - DNA, 25 bp, Homo sapien
ggacacccggaccagaggtgctcga

SEQ ID NO: 130132 - DNA, 25 bp, Homo sapien
ggacacccggacgagaggtgctcga

SEQ ID NO: 130133 - DNA, 25 bp, Homo sapien
acttcggtattaaacgtgtgtacac

SEQ ID NO: 130134 - DNA, 25 bp, Homo sapien
acttcggtattatacgtgtgtacac

SEQ ID NO: 130135 - DNA, 25 bp, Homo sapien
ttcgtttcgaacttcggatgttgta

SEQ ID NO: 130136 - DNA, 25 bp, Homo sapien
ttcgtttcgaacatcggatgttgta

SEQ ID NO: 130137 - DNA, 25 bp, Homo sapien
tccgtcggcagacgaccacttctgg

SEQ ID NO: 130138 - DNA, 25 bp, Homo sapien
tccgtcggcagaggaccacttctgg

SEQ ID NO: 130139 - DNA, 25 bp, Homo sapien
cccgtcaccctaggatcgagcttgg

SEQ ID NO: 130140 - DNA, 25 bp, Homo sapien
cccgtcaccctacgatcgagcttgg

SEQ ID NO: 130141 - DNA, 25 bp, Homo sapien
accacagacctgatagctaacttgg

SEQ ID NO: 130142 - DNA, 25 bp, Homo sapien
accacagacctgttagctaacttgg

SEQ ID NO: 130143 - DNA, 25 bp, Homo sapien
caagtgtcttagtggtctaactgta

SEQ ID NO: 130144 - DNA, 25 bp, Homo sapien
caagtgtcttagaggtctaactgta

SEQ ID NO: 130145 - DNA, 25 bp, Homo sapien
ccgaggtagccgaacaggaccccga

SEQ ID NO: 130146 - DNA, 25 bp, Homo sapien
ccgaggtagccgtacaggaccccga

SEQ ID NO: 130147 - DNA, 25 bp, Homo sapien
aggaggtgcctacacggtaacaaca

SEQ ID NO: 130148 - DNA, 25 bp, Homo sapien
aggaggtgcctagacggtaacaaca

SEQ ID NO: 130149 - DNA, 25 bp, Homo sapien
caagagcgcccatgcgtggaaccag

SEQ ID NO: 130150 - DNA, 25 bp, Homo sapien
caagagcgcccaagcgtggaaccag

SEQ ID NO: 130151 - DNA, 25 bp, Homo sapien
aaagaccccgaagtcggtgacctgt

SEQ ID NO: 130152 - DNA, 25 bp, Homo sapien
aaagaccccgaactcggtgacctgt

SEQ ID NO: 130153 - DNA, 25 bp, Homo sapien
taagaactacaccaatcctgaaggg

SEQ ID NO: 130154 - DNA, 25 bp, Homo sapien
taagaactacacgaatcctgaaggg

SEQ ID NO: 130155 - DNA, 25 bp, Homo sapien
tattaaaacccaagtccagcagaag

SEQ ID NO: 130156 - DNA, 25 bp, Homo sapien
tattaaaacccatgtccagcagaag

SEQ ID NO: 130157 - DNA, 25 bp, Homo sapien
taagcgtccctaagcaatcgagcga

SEQ ID NO: 130158 - DNA, 25 bp, Homo sapien
taagcgtccctatgcaatcgagcga

SEQ ID NO: 130159 - DNA, 25 bp, Homo sapien
ggaaggtgttcagttcaccggtgta

SEQ ID NO: 130160 - DNA, 25 bp, Homo sapien
ggaaggtgttcacttcaccggtgta

SEQ ID NO: 130161 - DNA, 25 bp, Homo sapien
gagttggcttacaccctatgatatt

SEQ ID NO: 130162 - DNA, 25 bp, Homo sapien
gagttggcttactccctatgatatt

SEQ ID NO: 130163 - DNA, 25 bp, Homo sapien
ggttgaatgtgtccactatgtccga

SEQ ID NO: 130164 - DNA, 25 bp, Homo sapien
ggttgaatgtgtgcactatgtccga

SEQ ID NO: 130165 - DNA, 25 bp, Homo sapien
ttgtttcttaattccatagggacac

SEQ ID NO: 130166 - DNA, 25 bp, Homo sapien
ttgtttcttaataccatagggacac

SEQ ID NO: 130167 - DNA, 25 bp, Homo sapien
tttttatgtttaagtctccagagca

SEQ ID NO: 130168 - DNA, 25 bp, Homo sapien
tttttatgtttatgtctccagagca

SEQ ID NO: 130169 - DNA, 25 bp, Homo sapien
ctgtcgtgtctgtaccccgggctag

SEQ ID NO: 130170 - DNA, 25 bp, Homo sapien
ctgtcgtgtctgaaccccgggctag

SEQ ID NO: 130171 - DNA, 25 bp, Homo sapien
tatgtgtatgtataactctgatctc

SEQ ID NO: 130172 - DNA, 25 bp, Homo sapien
tatgtgtatgtaaaactctgatctc

SEQ ID NO: 130173 - DNA, 25 bp, Homo sapien
gagtaattgtgtacctgtttctcgt

SEQ ID NO: 130174 - DNA, 25 bp, Homo sapien
gagtaattgtgttcctgtttctcgt

SEQ ID NO: 130175 - DNA, 25 bp, Homo sapien
agtcatgtctattgaactgacttgt

SEQ ID NO: 130176 - DNA, 25 bp, Homo sapien
agtcatgtctatagaactgacttgt

SEQ ID NO: 130177 - DNA, 25 bp, Homo sapien
gggtccgtgttataccctttcacgt

SEQ ID NO: 130178 - DNA, 25 bp, Homo sapien
gggtccgtgttaaaccctttcacgt

SEQ ID NO: 130179 - DNA, 25 bp, Homo sapien
ggagaactttagttacatttcacct

SEQ ID NO: 130180 - DNA, 25 bp, Homo sapien
ggagaactttagatacatttcacct

SEQ ID NO: 130181 - DNA, 25 bp, Homo sapien
attatattatgaaatagttcctcgt

SEQ ID NO: 130182 - DNA, 25 bp, Homo sapien
attatattatgatatagttcctcgt

SEQ ID NO: 130183 - DNA, 25 bp, Homo sapien
actgttgtcctcaacacagttccag

SEQ ID NO: 130184 - DNA, 25 bp, Homo sapien
actgttgtcctctacacagttccag

SEQ ID NO: 130185 - DNA, 25 bp, Homo sapien
acatatgtctcctttgtctgtcctg

SEQ ID NO: 130186 - DNA, 25 bp, Homo sapien
acatatgtctccattgtctgtcctg

SEQ ID NO: 130187 - DNA, 25 bp, Homo sapien
tattctcgtctgtctgttaaacctg

SEQ ID NO: 130188 - DNA, 25 bp, Homo sapien
tattctcgtctgactgttaaacctg

SEQ ID NO: 130189 - DNA, 25 bp, Homo sapien
gttctgttgctcgtcgtagtattgg

SEQ ID NO: 130190 - DNA, 25 bp, Homo sapien
gttctgttgctcctcgtagtattgg

SEQ ID NO: 130191 - DNA, 25 bp, Homo sapien
ttcgtagtatacgtgttacgtagtc

SEQ ID NO: 130192 - DNA, 25 bp, Homo sapien
ttcgtagtatacctgttacgtagtc

SEQ ID NO: 130193 - DNA, 25 bp, Homo sapien
acccggtatactcctagtagtgtct

SEQ ID NO: 130194 - DNA, 25 bp, Homo sapien
acccggtatactgctagtagtgtct

SEQ ID NO: 130195 - DNA, 25 bp, Homo sapien
gctcggtaagaacagtcttatagtt

SEQ ID NO: 130196 - DNA, 25 bp, Homo sapien
gctcggtaagaagagtcttatagtt

SEQ ID NO: 130197 - DNA, 25 bp, Homo sapien
taacatcgactaggacagtctattt

SEQ ID NO: 130198 - DNA, 25 bp, Homo sapien
taacatcgactacgacagtctattt

SEQ ID NO: 130199 - DNA, 25 bp, Homo sapien
gttacgaaagtttcgggttgtcact

SEQ ID NO: 130200 - DNA, 25 bp, Homo sapien
gttacgaaagttacgggttgtcact

SEQ ID NO: 130201 - DNA, 25 bp, Homo sapien
cgttgagatagaccattctgtattt

SEQ ID NO: 130202 - DNA, 25 bp, Homo sapien
cgttgagatagagcattctgtattt

SEQ ID NO: 130203 - DNA, 25 bp, Homo sapien
ttccttcagtcgactgtgtgtttct

SEQ ID NO: 130204 - DNA, 25 bp, Homo sapien
ttccttcagtcgtctgtgtgtttct

SEQ ID NO: 130205 - DNA, 25 bp, Homo sapien
gacttcggtcttaacaagatatttt

SEQ ID NO: 130206 - DNA, 25 bp, Homo sapien
gacttcggtctttacaagatatttt

SEQ ID NO: 130207 - DNA, 25 bp, Homo sapien
aagtccggagtctcaaatcattctt

SEQ ID NO: 130208 - DNA, 25 bp, Homo sapien
aagtccggagtcacaaatcattctt

SEQ ID NO: 130209 - DNA, 25 bp, Homo sapien
ccgtcttctgacaacagtccggttt

SEQ ID NO: 130210 - DNA, 25 bp, Homo sapien
ccgtcttctgactacagtccggttt

SEQ ID NO: 130211 - DNA, 25 bp, Homo sapien
ttcccgttttagtagaacaacttag

SEQ ID NO: 130212 - DNA, 25 bp, Homo sapien
ttcccgttttagaagaacaacttag

SEQ ID NO: 130213 - DNA, 25 bp, Homo sapien
gcacgttctttgagtcacttattct

SEQ ID NO: 130214 - DNA, 25 bp, Homo sapien
gcacgttctttgtgtcacttattct

SEQ ID NO: 130215 - DNA, 25 bp, Homo sapien
gtcctcggtctctttaggacaattt

SEQ ID NO: 130216 - DNA, 25 bp, Homo sapien
gtcctcggtctcattaggacaattt

SEQ ID NO: 130217 - DNA, 25 bp, Homo sapien
gacaccggtcattcttatccgattt

SEQ ID NO: 130218 - DNA, 25 bp, Homo sapien
gacaccggtcatacttatccgattt

SEQ ID NO: 130219 - DNA, 25 bp, Homo sapien
cacgggaggtactctctcgtcatgt

SEQ ID NO: 130220 - DNA, 25 bp, Homo sapien
cacgggaggtacactctcgtcatgt

SEQ ID NO: 130221 - DNA, 25 bp, Homo sapien
gacccctgcgagtcccatgttactg

SEQ ID NO: 130222 - DNA, 25 bp, Homo sapien
gacccctgcgagacccatgttactg

SEQ ID NO: 130223 - DNA, 25 bp, Homo sapien
acgggtgtcggtctgactccttctt

SEQ ID NO: 130224 - DNA, 25 bp, Homo sapien
acgggtgtcggtgtgactccttctt

SEQ ID NO: 130225 - DNA, 25 bp, Homo sapien
agctgacggctctatacccctcgat

SEQ ID NO: 130226 - DNA, 25 bp, Homo sapien
agctgacggctcaatacccctcgat

SEQ ID NO: 130227 - DNA, 25 bp, Homo sapien
gaacctaacggctcaactcaaacga

SEQ ID NO: 130228 - DNA, 25 bp, Homo sapien
gaacctaacggcacaactcaaacga

SEQ ID NO: 130229 - DNA, 25 bp, Homo sapien
atccgtagtaaaaccgatcaagaca

SEQ ID NO: 130230 - DNA, 25 bp, Homo sapien
atccgtagtaaatccgatcaagaca

SEQ ID NO: 130231 - DNA, 25 bp, Homo sapien
atctgagtcggatctttcaagatcg

SEQ ID NO: 130232 - DNA, 25 bp, Homo sapien
atctgagtcggaactttcaagatcg

SEQ ID NO: 130233 - DNA, 25 bp, Homo sapien
ttcagagcagcgtgtccgaagttgt

SEQ ID NO: 130234 - DNA, 25 bp, Homo sapien
ttcagagcagcgagtccgaagttgt

SEQ ID NO: 130235 - DNA, 25 bp, Homo sapien
tgcagtgaccaaagacacgaaaagt

SEQ ID NO: 130236 - DNA, 25 bp, Homo sapien
tgcagtgaccaatgacacgaaaagt

SEQ ID NO: 130237 - DNA, 25 bp, Homo sapien
tcagggacccggaattcagtcctaa

SEQ ID NO: 130238 - DNA, 25 bp, Homo sapien
tcagggacccggtattcagtcctaa

SEQ ID NO: 130239 - DNA, 25 bp, Homo sapien
cggtacaccgggttcagaggtccga

SEQ ID NO: 130240 - DNA, 25 bp, Homo sapien
cggtacaccgggatcagaggtccga

SEQ ID NO: 130241 - DNA, 25 bp, Homo sapien
cgtcgagtcccgagcactgtgggac

SEQ ID NO: 130242 - DNA, 25 bp, Homo sapien
cgtcgagtcccgtgcactgtgggac

SEQ ID NO: 130243 - DNA, 25 bp, Homo sapien
cactgtgtcgggtcccggtcctgct

SEQ ID NO: 130244 - DNA, 25 bp, Homo sapien
cactgtgtcgggacccggtcctgct

SEQ ID NO: 130245 - DNA, 25 bp, Homo sapien
tcccggtccgaaagcacgtttcttc

SEQ ID NO: 130246 - DNA, 25 bp, Homo sapien
tcccggtccgaatgcacgtttcttc

SEQ ID NO: 130247 - DNA, 25 bp, Homo sapien
ttccatctcattcgtcagtcactgg

SEQ ID NO: 130248 - DNA, 25 bp, Homo sapien
ttccatctcattggtcagtcactgg

SEQ ID NO: 130249 - DNA, 25 bp, Homo sapien
taatcgtcattcatcttgacacgag

SEQ ID NO: 130250 - DNA, 25 bp, Homo sapien
taatcgtcattcttcttgacacgag

SEQ ID NO: 130251 - DNA, 25 bp, Homo sapien
ttcctctcctcctgacttcttttca

SEQ ID NO: 130252 - DNA, 25 bp, Homo sapien
ttcctctcctccagacttcttttca

SEQ ID NO: 130253 - DNA, 25 bp, Homo sapien
agacttacgcccttactgttgacct

SEQ ID NO: 130254 - DNA, 25 bp, Homo sapien
agacttacgcccatactgttgacct

SEQ ID NO: 130255 - DNA, 25 bp, Homo sapien
cctgacccattctcttagatgtgaa

SEQ ID NO: 130256 - DNA, 25 bp, Homo sapien
cctgacccattcacttagatgtgaa

SEQ ID NO: 130257 - DNA, 25 bp, Homo sapien
gcgtgacgatcctcctctgtgctgg

SEQ ID NO: 130258 - DNA, 25 bp, Homo sapien
gcgtgacgatccacctctgtgctgg

SEQ ID NO: 130259 - DNA, 25 bp, Homo sapien
tgtgcactcaagtctgtcgagacca

SEQ ID NO: 130260 - DNA, 25 bp, Homo sapien
tgtgcactcaagactgtcgagacca

SEQ ID NO: 130261 - DNA, 25 bp, Homo sapien
tcggaaccggtaatcctcggagcgg

SEQ ID NO: 130262 - DNA, 25 bp, Homo sapien
tcggaaccggtattcctcggagcgg

SEQ ID NO: 130263 - DNA, 25 bp, Homo sapien
atgtcccgcggctcagcgtcgaatg

SEQ ID NO: 130264 - DNA, 25 bp, Homo sapien
atgtcccgcggcacagcgtcgaatg

SEQ ID NO: 130265 - DNA, 25 bp, Homo sapien
gtcccgcgggtgatgtaccgtacaa

SEQ ID NO: 130266 - DNA, 25 bp, Homo sapien
gtcccgcgggtgttgtaccgtacaa

SEQ ID NO: 130267 - DNA, 25 bp, Homo sapien
gtgacaggcgggttctctgtcctac

SEQ ID NO: 130268 - DNA, 25 bp, Homo sapien
gtgacaggcgggatctctgtcctac

SEQ ID NO: 130269 - DNA, 25 bp, Homo sapien
gtaacacaggagtgtctcgtctttt

SEQ ID NO: 130270 - DNA, 25 bp, Homo sapien
gtaacacaggagagtctcgtctttt

SEQ ID NO: 130271 - DNA, 25 bp, Homo sapien
ttcattgatcggatctttagtctct

SEQ ID NO: 130272 - DNA, 25 bp, Homo sapien
ttcattgatcggttctttagtctct

SEQ ID NO: 130273 - DNA, 25 bp, Homo sapien
gtcaagtgggttactctcctgtcga

SEQ ID NO: 130274 - DNA, 25 bp, Homo sapien
gtcaagtgggtttctctcctgtcga

SEQ ID NO: 130275 - DNA, 25 bp, Homo sapien
ggtcgtaaggatacacaggtgtcga

SEQ ID NO: 130276 - DNA, 25 bp, Homo sapien
ggtcgtaaggattcacaggtgtcga

SEQ ID NO: 130277 - DNA, 25 bp, Homo sapien
aggcctcaagatacggggtgtcgta

SEQ ID NO: 130278 - DNA, 25 bp, Homo sapien
aggcctcaagattcggggtgtcgta

SEQ ID NO: 130279 - DNA, 25 bp, Homo sapien
agtgggtcgaacaaccgtttatgga

SEQ ID NO: 130280 - DNA, 25 bp, Homo sapien
agtgggtcgaactaccgtttatgga

SEQ ID NO: 130281 - DNA, 25 bp, Homo sapien
tgggcgagacggatacctttgtcgc

SEQ ID NO: 130282 - DNA, 25 bp, Homo sapien
tgggcgagacggttacctttgtcgc

SEQ ID NO: 130283 - DNA, 25 bp, Homo sapien
ggaggaagacggtactgattacttc

SEQ ID NO: 130284 - DNA, 25 bp, Homo sapien
ggaggaagacggaactgattacttc

SEQ ID NO: 130285 - DNA, 25 bp, Homo sapien
aatcgtgaccggaactaatgtgtcc

SEQ ID NO: 130286 - DNA, 25 bp, Homo sapien
aatcgtgaccggtactaatgtgtcc

SEQ ID NO: 130287 - DNA, 25 bp, Homo sapien
ttctcgtcacggttgtacttttggt

SEQ ID NO: 130288 - DNA, 25 bp, Homo sapien
ttctcgtcacggatgtacttttggt

SEQ ID NO: 130289 - DNA, 25 bp, Homo sapien
gtctcttgtccagactcttgttcat

SEQ ID NO: 130290 - DNA, 25 bp, Homo sapien
gtctcttgtccacactcttgttcat

SEQ ID NO: 130291 - DNA, 25 bp, Homo sapien
gtcccgtatcaggtaaaacctcctc

SEQ ID NO: 130292 - DNA, 25 bp, Homo sapien
gtcccgtatcagctaaaacctcctc

SEQ ID NO: 130293 - DNA, 25 bp, Homo sapien
agagtcaaattgtaaagacactcca

SEQ ID NO: 130294 - DNA, 25 bp, Homo sapien
agagtcaaattgaaaagacactcca

SEQ ID NO: 130295 - DNA, 25 bp, Homo sapien
ggtcaaagtttcaacaatatgaact

SEQ ID NO: 130296 - DNA, 25 bp, Homo sapien
ggtcaaagtttctacaatatgaact

SEQ ID NO: 130297 - DNA, 25 bp, Homo sapien
attagataaggtatcaacacatgac

SEQ ID NO: 130298 - DNA, 25 bp, Homo sapien
attagataaggtttcaacacatgac

SEQ ID NO: 130299 - DNA, 25 bp, Homo sapien
tgacttaaatcgtcaagactcttgt

SEQ ID NO: 130300 - DNA, 25 bp, Homo sapien
tgacttaaatcgacaagactcttgt

SEQ ID NO: 130301 - DNA, 25 bp, Homo sapien
tgccaaatgcctgcacgtcgactcg

SEQ ID NO: 130302 - DNA, 25 bp, Homo sapien
tgccaaatgcctccacgtcgactcg

SEQ ID NO: 130303 - DNA, 25 bp, Homo sapien
ctcggaacacggattccgaatagtc

SEQ ID NO: 130304 - DNA, 25 bp, Homo sapien
ctcggaacacggtttccgaatagtc

SEQ ID NO: 130305 - DNA, 25 bp, Homo sapien
ggtcgaagacgagtcacgaagtacc

SEQ ID NO: 130306 - DNA, 25 bp, Homo sapien
ggtcgaagacgactcacgaagtacc

SEQ ID NO: 130307 - DNA, 25 bp, Homo sapien
tgccatataggacgaccgtagaacc

SEQ ID NO: 130308 - DNA, 25 bp, Homo sapien
tgccatataggaggaccgtagaacc

SEQ ID NO: 130309 - DNA, 25 bp, Homo sapien
ctcttactcggaggatacacatcct

SEQ ID NO: 130310 - DNA, 25 bp, Homo sapien
ctcttactcggacgatacacatcct

SEQ ID NO: 130311 - DNA, 25 bp, Homo sapien
gactttgttctgtcaatatagaccg

SEQ ID NO: 130312 - DNA, 25 bp, Homo sapien
gactttgttctgacaatatagaccg

SEQ ID NO: 130313 - DNA, 25 bp, Homo sapien
tacttctctttgtcactcaggtcga

SEQ ID NO: 130314 - DNA, 25 bp, Homo sapien
tacttctctttgacactcaggtcga

SEQ ID NO: 130315 - DNA, 25 bp, Homo sapien
ttccgtttccggtgtgtcgggtgtt

SEQ ID NO: 130316 - DNA, 25 bp, Homo sapien
ttccgtttccggagtgtcgggtgtt

SEQ ID NO: 130317 - DNA, 25 bp, Homo sapien
aacggtttgaggagtcgcatacgga

SEQ ID NO: 130318 - DNA, 25 bp, Homo sapien
aacggtttgaggtgtcgcatacgga

SEQ ID NO: 130319 - DNA, 25 bp, Homo sapien
cagttttgtgaccttcgacattaat

SEQ ID NO: 130320 - DNA, 25 bp, Homo sapien
cagttttgtgacgttcgacattaat

SEQ ID NO: 130321 - DNA, 25 bp, Homo sapien
gaaactctgacatcggctaagtata

SEQ ID NO: 130322 - DNA, 25 bp, Homo sapien
gaaactctgacaacggctaagtata

SEQ ID NO: 130323 - DNA, 25 bp, Homo sapien
acttctcagactccagagactataa

SEQ ID NO: 130324 - DNA, 25 bp, Homo sapien
acttctcagactgcagagactataa

SEQ ID NO: 130325 - DNA, 25 bp, Homo sapien
atgtactccacaccacggatattcg

SEQ ID NO: 130326 - DNA, 25 bp, Homo sapien
atgtactccacagcacggatattcg

SEQ ID NO: 130327 - DNA, 25 bp, Homo sapien
cagttcgacacgagtcgggtctccg

SEQ ID NO: 130328 - DNA, 25 bp, Homo sapien
cagttcgacacgtgtcgggtctccg

SEQ ID NO: 130329 - DNA, 25 bp, Homo sapien
gtcgttgcgcacgtcgtcgggttcc

SEQ ID NO: 130330 - DNA, 25 bp, Homo sapien
gtcgttgcgcacctcgtcgggttcc

SEQ ID NO: 130331 - DNA, 25 bp, Homo sapien
gttaaagcactcagtgttacgtcct

SEQ ID NO: 130332 - DNA, 25 bp, Homo sapien
gttaaagcactctgtgttacgtcct

SEQ ID NO: 130333 - DNA, 25 bp, Homo sapien
gtattcgactactcgtactgtccct

SEQ ID NO: 130334 - DNA, 25 bp, Homo sapien
gtattcgactacacgtactgtccct

SEQ ID NO: 130335 - DNA, 25 bp, Homo sapien
gggttttatcgaccatacattctcc

SEQ ID NO: 130336 - DNA, 25 bp, Homo sapien
gggttttatcgagcatacattctcc

SEQ ID NO: 130337 - DNA, 25 bp, Homo sapien
tgggtcctgtcacagacacatctcc

SEQ ID NO: 130338 - DNA, 25 bp, Homo sapien
tgggtcctgtcagagacacatctcc

SEQ ID NO: 130339 - DNA, 25 bp, Homo sapien
tttagagtgatttatcaaatgcctc

SEQ ID NO: 130340 - DNA, 25 bp, Homo sapien
tttagagtgattaatcaaatgcctc

SEQ ID NO: 130341 - DNA, 25 bp, Homo sapien
gttatggagcctttcactttgaatg

SEQ ID NO: 130342 - DNA, 25 bp, Homo sapien
gttatggagcctatcactttgaatg

SEQ ID NO: 130343 - DNA, 25 bp, Homo sapien
tagagaactaaattagtcccgaaac

SEQ ID NO: 130344 - DNA, 25 bp, Homo sapien
tagagaactaaaatagtcccgaaac

SEQ ID NO: 130345 - DNA, 25 bp, Homo sapien
tggttgacacgtactatgacaaatc

SEQ ID NO: 130346 - DNA, 25 bp, Homo sapien
tggttgacacgttctatgacaaatc

SEQ ID NO: 130347 - DNA, 25 bp, Homo sapien
ttctataaccacacatagaaaatat

SEQ ID NO: 130348 - DNA, 25 bp, Homo sapien
ttctataaccactcatagaaaatat

SEQ ID NO: 130349 - DNA, 25 bp, Homo sapien
gtgggtcatctttcctagaagatga

SEQ ID NO: 130350 - DNA, 25 bp, Homo sapien
gtgggtcatcttacctagaagatga

SEQ ID NO: 130351 - DNA, 25 bp, Homo sapien
catgtcctaagtcgtcacagattaa

SEQ ID NO: 130352 - DNA, 25 bp, Homo sapien
catgtcctaagtggtcacagattaa

SEQ ID NO: 130353 - DNA, 25 bp, Homo sapien
actacgttcaatttggttacttaag

SEQ ID NO: 130354 - DNA, 25 bp, Homo sapien
actacgttcaatatggttacttaag

SEQ ID NO: 130355 - DNA, 25 bp, Homo sapien
gacgttcctaaaggactactttggt

SEQ ID NO: 130356 - DNA, 25 bp, Homo sapien
gacgttcctaaacgactactttggt

SEQ ID NO: 130357 - DNA, 25 bp, Homo sapien
cacggttctacagagacatgtttct

SEQ ID NO: 130358 - DNA, 25 bp, Homo sapien
cacggttctacacagacatgtttct

SEQ ID NO: 130359 - DNA, 25 bp, Homo sapien
aggacgtttcaaacagtatgtcaaa

SEQ ID NO: 130360 - DNA, 25 bp, Homo sapien
aggacgtttcaatcagtatgtcaaa

SEQ ID NO: 130361 - DNA, 25 bp, Homo sapien
gagaacattctgtcaacttcttaag

SEQ ID NO: 130362 - DNA, 25 bp, Homo sapien
gagaacattctgacaacttcttaag

SEQ ID NO: 130363 - DNA, 25 bp, Homo sapien
cttatcgtctgaaagacggtctaaa

SEQ ID NO: 130364 - DNA, 25 bp, Homo sapien
cttatcgtctgatagacggtctaaa

SEQ ID NO: 130365 - DNA, 25 bp, Homo sapien
aacgtgttttctgaggtcgatacat

SEQ ID NO: 130366 - DNA, 25 bp, Homo sapien
aacgtgttttctcaggtcgatacat

SEQ ID NO: 130367 - DNA, 25 bp, Homo sapien
tgtcatttctttccaggttagtcat

SEQ ID NO: 130368 - DNA, 25 bp, Homo sapien
tgtcatttctttgcaggttagtcat

SEQ ID NO: 130369 - DNA, 25 bp, Homo sapien
tatctaaatcccttgtgacacggga

SEQ ID NO: 130370 - DNA, 25 bp, Homo sapien
tatctaaatcccatgtgacacggga

SEQ ID NO: 130371 - DNA, 25 bp, Homo sapien
ttcggaccacccttcgtgaccagga

SEQ ID NO: 130372 - DNA, 25 bp, Homo sapien
ttcggaccacccatcgtgaccagga

SEQ ID NO: 130373 - DNA, 25 bp, Homo sapien
ttcgaaaccagtatcggtatcaaga

SEQ ID NO: 130374 - DNA, 25 bp, Homo sapien
ttcgaaaccagtttcggtatcaaga

SEQ ID NO: 130375 - DNA, 25 bp, Homo sapien
atgaagggactggtctgaccgtaaa

SEQ ID NO: 130376 - DNA, 25 bp, Homo sapien
atgaagggactgctctgaccgtaaa

SEQ ID NO: 130377 - DNA, 25 bp, Homo sapien
atggagagagtactccagaagaaca

SEQ ID NO: 130378 - DNA, 25 bp, Homo sapien
atggagagagtagtccagaagaaca

SEQ ID NO: 130379 - DNA, 25 bp, Homo sapien
agggtagtagtgacgacaactcaaa

SEQ ID NO: 130380 - DNA, 25 bp, Homo sapien
agggtagtagtgtcgacaactcaaa

SEQ ID NO: 130381 - DNA, 25 bp, Homo sapien
aggtcttgtgtccaccgtctcgaga

SEQ ID NO: 130382 - DNA, 25 bp, Homo sapien
aggtcttgtgtcgaccgtctcgaga

SEQ ID NO: 130383 - DNA, 25 bp, Homo sapien
cgacggttctttggtcactcaagta

SEQ ID NO: 130384 - DNA, 25 bp, Homo sapien
cgacggttctttcgtcactcaagta

SEQ ID NO: 130385 - DNA, 25 bp, Homo sapien
tcacggacctttgtgcgtgtcgtta

SEQ ID NO: 130386 - DNA, 25 bp, Homo sapien
tcacggacctttctgcgtgtcgtta

SEQ ID NO: 130387 - DNA, 25 bp, Homo sapien
cgagaactttgtatagacggccgtc

SEQ ID NO: 130388 - DNA, 25 bp, Homo sapien
cgagaactttgtttagacggccgtc

SEQ ID NO: 130389 - DNA, 25 bp, Homo sapien
gtgacgattccgtcagtcggtcctg

SEQ ID NO: 130390 - DNA, 25 bp, Homo sapien
gtgacgattccgacagtcggtcctg

SEQ ID NO: 130391 - DNA, 25 bp, Homo sapien
gtctgccacaggaccgtgaccgtcg

SEQ ID NO: 130392 - DNA, 25 bp, Homo sapien
gtctgccacaggtccgtgaccgtcg

SEQ ID NO: 130393 - DNA, 25 bp, Homo sapien
tctacccactggttctcgtcgacaa

SEQ ID NO: 130394 - DNA, 25 bp, Homo sapien
tctacccactggatctcgtcgacaa

SEQ ID NO: 130395 - DNA, 25 bp, Homo sapien
tctatatagaatgagtcttgcagac

SEQ ID NO: 130396 - DNA, 25 bp, Homo sapien
tctatatagaatcagtcttgcagac

SEQ ID NO: 130397 - DNA, 25 bp, Homo sapien
ttcacgtattattgtaaacctagac

SEQ ID NO: 130398 - DNA, 25 bp, Homo sapien
ttcacgtattatagtaaacctagac

SEQ ID NO: 130399 - DNA, 25 bp, Homo sapien
ttcacgtacccctgagaaagttcac

SEQ ID NO: 130400 - DNA, 25 bp, Homo sapien
ttcacgtaccccagagaaagttcac

SEQ ID NO: 130401 - DNA, 25 bp, Homo sapien
caatgcagcccgtatttgtagtatc

SEQ ID NO: 130402 - DNA, 25 bp, Homo sapien
caatgcagcccgaatttgtagtatc

SEQ ID NO: 130403 - DNA, 25 bp, Homo sapien
ggtacagaactgtaagtgtactttc

SEQ ID NO: 130404 - DNA, 25 bp, Homo sapien
ggtacagaactgaaagtgtactttc

SEQ ID NO: 130405 - DNA, 25 bp, Homo sapien
aacgactaaaagatacgtcgttact

SEQ ID NO: 130406 - DNA, 25 bp, Homo sapien
aacgactaaaagttacgtcgttact

SEQ ID NO: 130407 - DNA, 25 bp, Homo sapien
acgacgtacgactaaggtcgcggat

SEQ ID NO: 130408 - DNA, 25 bp, Homo sapien
acgacgtacgacaaaggtcgcggat

SEQ ID NO: 130409 - DNA, 25 bp, Homo sapien
cgggctgctgaagagtccgcgacta

SEQ ID NO: 130410 - DNA, 25 bp, Homo sapien
cgggctgctgaacagtccgcgacta

SEQ ID NO: 130411 - DNA, 25 bp, Homo sapien
ccggccgacggtgtatccccggaga

SEQ ID NO: 130412 - DNA, 25 bp, Homo sapien
ccggccgacggtctatccccggaga

SEQ ID NO: 130413 - DNA, 25 bp, Homo sapien
ggccaccactgtgtgcactccggaa

SEQ ID NO: 130414 - DNA, 25 bp, Homo sapien
ggccaccactgtctgcactccggaa

SEQ ID NO: 130415 - DNA, 25 bp, Homo sapien
agaccaccgtctagccctgcgggaa

SEQ ID NO: 130416 - DNA, 25 bp, Homo sapien
agaccaccgtcttgccctgcgggaa

SEQ ID NO: 130417 - DNA, 25 bp, Homo sapien
cgtccctgtccgtccttcgagaagg

SEQ ID NO: 130418 - DNA, 25 bp, Homo sapien
cgtccctgtccgaccttcgagaagg

SEQ ID NO: 130419 - DNA, 25 bp, Homo sapien
caccctttgtgtcttgtttgagaga

SEQ ID NO: 130420 - DNA, 25 bp, Homo sapien
caccctttgtgtgttgtttgagaga

SEQ ID NO: 130421 - DNA, 25 bp, Homo sapien
actccaaaaaggtgtgtttcacata

SEQ ID NO: 130422 - DNA, 25 bp, Homo sapien
actccaaaaaggagtgtttcacata

SEQ ID NO: 130423 - DNA, 25 bp, Homo sapien
catctaggtgatcgtgtacaccaaa

SEQ ID NO: 130424 - DNA, 25 bp, Homo sapien
catctaggtgatggtgtacaccaaa

SEQ ID NO: 130425 - DNA, 25 bp, Homo sapien
cttggagatagtcactctgaagagt

SEQ ID NO: 130426 - DNA, 25 bp, Homo sapien
cttggagatagtgactctgaagagt

SEQ ID NO: 130427 - DNA, 25 bp, Homo sapien
gttcggacgaggatcgatcctttgt

SEQ ID NO: 130428 - DNA, 25 bp, Homo sapien
gttcggacgaggttcgatcctttgt

SEQ ID NO: 130429 - DNA, 25 bp, Homo sapien
aggtcgcctgaggtacggttatttc

SEQ ID NO: 130430 - DNA, 25 bp, Homo sapien
aggtcgcctgagctacggttatttc

SEQ ID NO: 130431 - DNA, 25 bp, Homo sapien
agtgcagaccggaatattacgttga

SEQ ID NO: 130432 - DNA, 25 bp, Homo sapien
agtgcagaccggtatattacgttga

SEQ ID NO: 130433 - DNA, 25 bp, Homo sapien
cctgtcttcaggtacattcgtcgaa

SEQ ID NO: 130434 - DNA, 25 bp, Homo sapien
cctgtcttcaggaacattcgtcgaa

SEQ ID NO: 130435 - DNA, 25 bp, Homo sapien
cactctctccagggtacctttacaa

SEQ ID NO: 130436 - DNA, 25 bp, Homo sapien
cactctctccagcgtacctttacaa

SEQ ID NO: 130437 - DNA, 25 bp, Homo sapien
tctgcgcacgggtaacgtgaacgta

SEQ ID NO: 130438 - DNA, 25 bp, Homo sapien
tctgcgcacgggaaacgtgaacgta

SEQ ID NO: 130439 - DNA, 25 bp, Homo sapien
ccacggaccgaaacttagacgacct

SEQ ID NO: 130440 - DNA, 25 bp, Homo sapien
ccacggaccgaatcttagacgacct

SEQ ID NO: 130441 - DNA, 25 bp, Homo sapien
tcctaagtagaaggaccgaccgatc

SEQ ID NO: 130442 - DNA, 25 bp, Homo sapien
tcctaagtagaacgaccgaccgatc

SEQ ID NO: 130443 - DNA, 25 bp, Homo sapien
tcgtgtaggagatccagtctcagca

SEQ ID NO: 130444 - DNA, 25 bp, Homo sapien
tcgtgtaggagaaccagtctcagca

SEQ ID NO: 130445 - DNA, 25 bp, Homo sapien
tgtatccgggtcatccatatcaatc

SEQ ID NO: 130446 - DNA, 25 bp, Homo sapien
tgtatccgggtcttccatatcaatc

SEQ ID NO: 130447 - DNA, 25 bp, Homo sapien
taagtccggtacctcttttaggaaa

SEQ ID NO: 130448 - DNA, 25 bp, Homo sapien
taagtccggtacgtcttttaggaaa

SEQ ID NO: 130449 - DNA, 25 bp, Homo sapien
ttacagacctaagttttgtccaatg

SEQ ID NO: 130450 - DNA, 25 bp, Homo sapien
ttacagacctaacttttgtccaatg

SEQ ID NO: 130451 - DNA, 25 bp, Homo sapien
gagccgatcccgtctctccaagtat

SEQ ID NO: 130452 - DNA, 25 bp, Homo sapien
gagccgatcccgactctccaagtat

SEQ ID NO: 130453 - DNA, 25 bp, Homo sapien
gggtcggcttacaaactacaatagg

SEQ ID NO: 130454 - DNA, 25 bp, Homo sapien
gggtcggcttactaactacaatagg

SEQ ID NO: 130455 - DNA, 25 bp, Homo sapien
agacggccgtcttgacacaagtagg

SEQ ID NO: 130456 - DNA, 25 bp, Homo sapien
agacggccgtctagacacaagtagg

SEQ ID NO: 130457 - DNA, 25 bp, Homo sapien
gaaaggactctactcgaagagtaag

SEQ ID NO: 130458 - DNA, 25 bp, Homo sapien
gaaaggactctagtcgaagagtaag

SEQ ID NO: 130459 - DNA, 25 bp, Homo sapien
gacggagtgcctacggagtcagaag

SEQ ID NO: 130460 - DNA, 25 bp, Homo sapien
gacggagtgccttcggagtcagaag

SEQ ID NO: 130461 - DNA, 25 bp, Homo sapien
aaggagaggaagacgtgtcctctgt

SEQ ID NO: 130462 - DNA, 25 bp, Homo sapien
aaggagaggaagtcgtgtcctctgt

SEQ ID NO: 130463 - DNA, 25 bp, Homo sapien
agaggaggaagatacgtcggacctt

SEQ ID NO: 130464 - DNA, 25 bp, Homo sapien
agaggaggaagaaacgtcggacctt

SEQ ID NO: 130465 - DNA, 25 bp, Homo sapien
catgtgcccgactatacgcacgcag

SEQ ID NO: 130466 - DNA, 25 bp, Homo sapien
catgtgcccgacaatacgcacgcag

SEQ ID NO: 130467 - DNA, 25 bp, Homo sapien
atgacgcacagttacccgtccgaca

SEQ ID NO: 130468 - DNA, 25 bp, Homo sapien
atgacgcacagtaacccgtccgaca

SEQ ID NO: 130469 - DNA, 25 bp, Homo sapien
gtagactcgaaggaacctcagtaga

SEQ ID NO: 130470 - DNA, 25 bp, Homo sapien
gtagactcgaagcaacctcagtaga

SEQ ID NO: 130471 - DNA, 25 bp, Homo sapien
atgtcagtctcaagtgaccgcgaaa

SEQ ID NO: 130472 - DNA, 25 bp, Homo sapien
atgtcagtctcatgtgaccgcgaaa

SEQ ID NO: 130473 - DNA, 25 bp, Homo sapien
aaccggtccttgtggtcgcggacca

SEQ ID NO: 130474 - DNA, 25 bp, Homo sapien
aaccggtccttgaggtcgcggacca

SEQ ID NO: 130475 - DNA, 25 bp, Homo sapien
accgatctgtcgtccgtcctgtcag

SEQ ID NO: 130476 - DNA, 25 bp, Homo sapien
accgatctgtcgaccgtcctgtcag

SEQ ID NO: 130477 - DNA, 25 bp, Homo sapien
acgtcctcaacgtactcgtccaggg

SEQ ID NO: 130478 - DNA, 25 bp, Homo sapien
acgtcctcaacgaactcgtccaggg

SEQ ID NO: 130479 - DNA, 25 bp, Homo sapien
acaacacacaagaaccttacaggag

SEQ ID NO: 130480 - DNA, 25 bp, Homo sapien
acaacacacaagtaccttacaggag

SEQ ID NO: 130481 - DNA, 25 bp, Homo sapien
acacggtaccgaagacgacagtaaa

SEQ ID NO: 130482 - DNA, 25 bp, Homo sapien
acacggtaccgatgacgacagtaaa

SEQ ID NO: 130483 - DNA, 25 bp, Homo sapien
caatgatattcttcgacatagagac

SEQ ID NO: 130484 - DNA, 25 bp, Homo sapien
caatgatattctacgacatagagac

SEQ ID NO: 130485 - DNA, 25 bp, Homo sapien
ctcacgtaaccgtcgctagtcacgt

SEQ ID NO: 130486 - DNA, 25 bp, Homo sapien
ctcacgtaaccgacgctagtcacgt

SEQ ID NO: 130487 - DNA, 25 bp, Homo sapien
cggtaagaagggtccgagaacatag

SEQ ID NO: 130488 - DNA, 25 bp, Homo sapien
cggtaagaagggaccgagaacatag

SEQ ID NO: 130489 - DNA, 25 bp, Homo sapien
tcaagaagtcggtaataactagctc

SEQ ID NO: 130490 - DNA, 25 bp, Homo sapien
tcaagaagtcggaaataactagctc

SEQ ID NO: 130491 - DNA, 25 bp, Homo sapien
ccggacagtacagcattacaactta

SEQ ID NO: 130492 - DNA, 25 bp, Homo sapien
ccggacagtacaccattacaactta

SEQ ID NO: 130493 - DNA, 25 bp, Homo sapien
agtctacacgagtgtcaatacctac

SEQ ID NO: 130494 - DNA, 25 bp, Homo sapien
agtctacacgagagtcaatacctac

SEQ ID NO: 130495 - DNA, 25 bp, Homo sapien
agacactactcgtcttaattactat

SEQ ID NO: 130496 - DNA, 25 bp, Homo sapien
agacactactcgacttaattactat

SEQ ID NO: 130497 - DNA, 25 bp, Homo sapien
gaagtacactcgttacaatagtcca

SEQ ID NO: 130498 - DNA, 25 bp, Homo sapien
gaagtacactcgatacaatagtcca

SEQ ID NO: 130499 - DNA, 25 bp, Homo sapien
agagagagggatagaacacttcaca

SEQ ID NO: 130500 - DNA, 25 bp, Homo sapien
agagagagggattgaacacttcaca

SEQ ID NO: 130501 - DNA, 25 bp, Homo sapien
cgagcgagaggactgagtcccccag

SEQ ID NO: 130502 - DNA, 25 bp, Homo sapien
cgagcgagaggagtgagtcccccag

SEQ ID NO: 130503 - DNA, 25 bp, Homo sapien
cggaagagacgaagagtggcaccca

SEQ ID NO: 130504 - DNA, 25 bp, Homo sapien
cggaagagacgatgagtggcaccca

SEQ ID NO: 130505 - DNA, 25 bp, Homo sapien
cggaacccgaagtacgggacccgag

SEQ ID NO: 130506 - DNA, 25 bp, Homo sapien
cggaacccgaagaacgggacccgag

SEQ ID NO: 130507 - DNA, 25 bp, Homo sapien
tttacctgtaaccaggtaaaccgta

SEQ ID NO: 130508 - DNA, 25 bp, Homo sapien
tttacctgtaacgaggtaaaccgta

SEQ ID NO: 130509 - DNA, 25 bp, Homo sapien
tctgttgtagtcagaacaaacacgg

SEQ ID NO: 130510 - DNA, 25 bp, Homo sapien
tctgttgtagtctgaacaaacacgg

SEQ ID NO: 130511 - DNA, 25 bp, Homo sapien
ctacctcagcacagaactaaaacgg

SEQ ID NO: 130512 - DNA, 25 bp, Homo sapien
ctacctcagcactgaactaaaacgg

SEQ ID NO: 130513 - DNA, 25 bp, Homo sapien
ccttcccagtcacgtacagtaaacg

SEQ ID NO: 130514 - DNA, 25 bp, Homo sapien
ccttcccagtcaggtacagtaaacg

SEQ ID NO: 130515 - DNA, 25 bp, Homo sapien
catatgtccttaagtaaagtcatcg

SEQ ID NO: 130516 - DNA, 25 bp, Homo sapien
catatgtccttatgtaaagtcatcg

SEQ ID NO: 130517 - DNA, 25 bp, Homo sapien
cggtctgtgggctgtccaccacggt

SEQ ID NO: 130518 - DNA, 25 bp, Homo sapien
cggtctgtgggcagtccaccacggt

SEQ ID NO: 130519 - DNA, 25 bp, Homo sapien
gagggttacggactcctcaccgcgt

SEQ ID NO: 130520 - DNA, 25 bp, Homo sapien
gagggttacggagtcctcaccgcgt

SEQ ID NO: 130521 - DNA, 25 bp, Homo sapien
cgtagaagtcgacttcctcctgtgt

SEQ ID NO: 130522 - DNA, 25 bp, Homo sapien
cgtagaagtcgagttcctcctgtgt

SEQ ID NO: 130523 - DNA, 25 bp, Homo sapien
cttcgtcgtcaggtttcactccttc

SEQ ID NO: 130524 - DNA, 25 bp, Homo sapien
cttcgtcgtcagctttcactccttc

SEQ ID NO: 130525 - DNA, 25 bp, Homo sapien
ttcgacttcgactttaagaccctcg

SEQ ID NO: 130526 - DNA, 25 bp, Homo sapien
ttcgacttcgacattaagaccctcg

SEQ ID NO: 130527 - DNA, 25 bp, Homo sapien
ttcgacacctgtccttgtctgacct

SEQ ID NO: 130528 - DNA, 25 bp, Homo sapien
ttcgacacctgtgcttgtctgacct

SEQ ID NO: 130529 - DNA, 25 bp, Homo sapien
tcgttacgtgtgttctgaggagttc

SEQ ID NO: 130530 - DNA, 25 bp, Homo sapien
tcgttacgtgtgatctgaggagttc

SEQ ID NO: 130531 - DNA, 25 bp, Homo sapien
ttcttacgctggtgtagacggtgta

SEQ ID NO: 130532 - DNA, 25 bp, Homo sapien
ttcttacgctggagtagacggtgta

SEQ ID NO: 130533 - DNA, 25 bp, Homo sapien
tgacttcgatcataactcgacgtga

SEQ ID NO: 130534 - DNA, 25 bp, Homo sapien
tgacttcgatcaaaactcgacgtga

SEQ ID NO: 130535 - DNA, 25 bp, Homo sapien
gaacccgtcattcatacgacgagag

SEQ ID NO: 130536 - DNA, 25 bp, Homo sapien
gaacccgtcattgatacgacgagag

SEQ ID NO: 130537 - DNA, 25 bp, Homo sapien
tacacgacaccactcgatccgggag

SEQ ID NO: 130538 - DNA, 25 bp, Homo sapien
tacacgacaccagtcgatccgggag

SEQ ID NO: 130539 - DNA, 25 bp, Homo sapien
taccagacctctaacatcgtgggtg

SEQ ID NO: 130540 - DNA, 25 bp, Homo sapien
taccagacctcttacatcgtgggtg

SEQ ID NO: 130541 - DNA, 25 bp, Homo sapien
ggccagcactcttacatgtgtgggt

SEQ ID NO: 130542 - DNA, 25 bp, Homo sapien
ggccagcactctaacatgtgtgggt

SEQ ID NO: 130543 - DNA, 25 bp, Homo sapien
gtcaggtccgtacatctgtagtcgg

SEQ ID NO: 130544 - DNA, 25 bp, Homo sapien
gtcaggtccgtagatctgtagtcgg

SEQ ID NO: 130545 - DNA, 25 bp, Homo sapien
ttaggacacaggtcggatcctggtc

SEQ ID NO: 130546 - DNA, 25 bp, Homo sapien
ttaggacacaggacggatcctggtc

SEQ ID NO: 130547 - DNA, 25 bp, Homo sapien
atcggtgacaggacggaccctaggc

SEQ ID NO: 130548 - DNA, 25 bp, Homo sapien
atcggtgacaggtcggaccctaggc

SEQ ID NO: 130549 - DNA, 25 bp, Homo sapien
tggtaagatgtccttctggtgactc

SEQ ID NO: 130550 - DNA, 25 bp, Homo sapien
tggtaagatgtcgttctggtgactc

SEQ ID NO: 130551 - DNA, 25 bp, Homo sapien
tggaccgacttcagtttaggtcatt

SEQ ID NO: 130552 - DNA, 25 bp, Homo sapien
tggaccgacttctgtttaggtcatt

SEQ ID NO: 130553 - DNA, 25 bp, Homo sapien
ggtaccggtttcttagagacctata

SEQ ID NO: 130554 - DNA, 25 bp, Homo sapien
ggtaccggtttcatagagacctata

SEQ ID NO: 130555 - DNA, 25 bp, Homo sapien
agaacagtcgtcactttacgtgatg

SEQ ID NO: 130556 - DNA, 25 bp, Homo sapien
agaacagtcgtctctttacgtgatg

SEQ ID NO: 130557 - DNA, 25 bp, Homo sapien
agaatattacgagtcggagtctcta

SEQ ID NO: 130558 - DNA, 25 bp, Homo sapien
agaatattacgactcggagtctcta

SEQ ID NO: 130559 - DNA, 25 bp, Homo sapien
tacttggtgagaggaacgagtactc

SEQ ID NO: 130560 - DNA, 25 bp, Homo sapien
tacttggtgagacgaacgagtactc

SEQ ID NO: 130561 - DNA, 25 bp, Homo sapien
ccgaggtcggtgctgagctactcgt

SEQ ID NO: 130562 - DNA, 25 bp, Homo sapien
ccgaggtcggtggtgagctactcgt

SEQ ID NO: 130563 - DNA, 25 bp, Homo sapien
gtcctctgatcttatgacatctatg

SEQ ID NO: 130564 - DNA, 25 bp, Homo sapien
gtcctctgatctaatgacatctatg

SEQ ID NO: 130565 - DNA, 25 bp, Homo sapien
ttctggaagtcgaagtaagtctctg

SEQ ID NO: 130566 - DNA, 25 bp, Homo sapien
ttctggaagtcgtagtaagtctctg

SEQ ID NO: 130567 - DNA, 25 bp, Homo sapien
cgtaggacttcttcgtatgttctcg

SEQ ID NO: 130568 - DNA, 25 bp, Homo sapien
cgtaggacttctacgtatgttctcg

SEQ ID NO: 130569 - DNA, 25 bp, Homo sapien
tccattccggttagagttcgttccg

SEQ ID NO: 130570 - DNA, 25 bp, Homo sapien
tccattccggtttgagttcgttccg

SEQ ID NO: 130571 - DNA, 25 bp, Homo sapien
caccatctcggaacccgttttctgt

SEQ ID NO: 130572 - DNA, 25 bp, Homo sapien
caccatctcggatcccgttttctgt

SEQ ID NO: 130573 - DNA, 25 bp, Homo sapien
tggagccccgtgttccttgtcttga

SEQ ID NO: 130574 - DNA, 25 bp, Homo sapien
tggagccccgtgatccttgtcttga

SEQ ID NO: 130575 - DNA, 25 bp, Homo sapien
ggtttttcgatcttaattgtttgta

SEQ ID NO: 130576 - DNA, 25 bp, Homo sapien
ggtttttcgatcataattgtttgta

SEQ ID NO: 130577 - DNA, 25 bp, Homo sapien
gaatatgaaacgaacacgttctaaa

SEQ ID NO: 130578 - DNA, 25 bp, Homo sapien
gaatatgaaacgtacacgttctaaa

SEQ ID NO: 130579 - DNA, 25 bp, Homo sapien
aattcgagacagaacttcacgacta

SEQ ID NO: 130580 - DNA, 25 bp, Homo sapien
aattcgagacagtacttcacgacta

SEQ ID NO: 130581 - DNA, 25 bp, Homo sapien
tcgattgagacgacgtcggtgaaac

SEQ ID NO: 130582 - DNA, 25 bp, Homo sapien
tcgattgagacgtcgtcggtgaaac

SEQ ID NO: 130583 - DNA, 25 bp, Homo sapien
cgggtgtagtactctcggcgacatc

SEQ ID NO: 130584 - DNA, 25 bp, Homo sapien
cgggtgtagtacactcggcgacatc

SEQ ID NO: 130585 - DNA, 25 bp, Homo sapien
ggagtcagtacatccactagaagta

SEQ ID NO: 130586 - DNA, 25 bp, Homo sapien
ggagtcagtacaaccactagaagta

SEQ ID NO: 130587 - DNA, 25 bp, Homo sapien
ctagaggacttgatttaccgtaaca

SEQ ID NO: 130588 - DNA, 25 bp, Homo sapien
ctagaggacttgttttaccgtaaca

SEQ ID NO: 130589 - DNA, 25 bp, Homo sapien
cagacttttctgaaactgacgtaga

SEQ ID NO: 130590 - DNA, 25 bp, Homo sapien
cagacttttctgtaactgacgtaga

SEQ ID NO: 130591 - DNA, 25 bp, Homo sapien
ttcattacttctgatcccgtgagaa

SEQ ID NO: 130592 - DNA, 25 bp, Homo sapien
ttcattacttctcatcccgtgagaa

SEQ ID NO: 130593 - DNA, 25 bp, Homo sapien
taggacttatttactcttgagatct

SEQ ID NO: 130594 - DNA, 25 bp, Homo sapien
taggacttattttctcttgagatct

SEQ ID NO: 130595 - DNA, 25 bp, Homo sapien
tcaactttttacgtgtgtcggttct

SEQ ID NO: 130596 - DNA, 25 bp, Homo sapien
tcaactttttacctgtgtcggttct

SEQ ID NO: 130597 - DNA, 25 bp, Homo sapien
ccctcgtttcgtaggtggtcttctc

SEQ ID NO: 130598 - DNA, 25 bp, Homo sapien
ccctcgtttcgttggtggtcttctc

SEQ ID NO: 130599 - DNA, 25 bp, Homo sapien
acccgaggtgttcgtcctccgctgt

SEQ ID NO: 130600 - DNA, 25 bp, Homo sapien
acccgaggtgttggtcctccgctgt

SEQ ID NO: 130601 - DNA, 25 bp, Homo sapien
ctaactagagggttccctccagggg

SEQ ID NO: 130602 - DNA, 25 bp, Homo sapien
ctaactagagggatccctccagggg

SEQ ID NO: 130603 - DNA, 25 bp, Homo sapien
agacagacaggtctcccacgaggga

SEQ ID NO: 130604 - DNA, 25 bp, Homo sapien
agacagacaggtgtcccacgaggga

SEQ ID NO: 130605 - DNA, 25 bp, Homo sapien
caagaagtcagaccagaacgtagga

SEQ ID NO: 130606 - DNA, 25 bp, Homo sapien
caagaagtcagagcagaacgtagga

SEQ ID NO: 130607 - DNA, 25 bp, Homo sapien
aggagaagtcaaaccgagcgaggta

SEQ ID NO: 130608 - DNA, 25 bp, Homo sapien
aggagaagtcaatccgagcgaggta

SEQ ID NO: 130609 - DNA, 25 bp, Homo sapien
ggtgactaagttcgttacccagtga

SEQ ID NO: 130610 - DNA, 25 bp, Homo sapien
ggtgactaagttggttacccagtga

SEQ ID NO: 130611 - DNA, 25 bp, Homo sapien
aggaacaccttttcgtcaaagggta

SEQ ID NO: 130612 - DNA, 25 bp, Homo sapien
aggaacacctttacgtcaaagggta

SEQ ID NO: 130613 - DNA, 25 bp, Homo sapien
ttaaagactatgttccaaaatgtat

SEQ ID NO: 130614 - DNA, 25 bp, Homo sapien
ttaaagactatgatccaaaatgtat

SEQ ID NO: 130615 - DNA, 25 bp, Homo sapien
gacgacggatacttaccaaatctcc

SEQ ID NO: 130616 - DNA, 25 bp, Homo sapien
gacgacggatacataccaaatctcc

SEQ ID NO: 130617 - DNA, 25 bp, Homo sapien
agggtcctatttccataccgtccct

SEQ ID NO: 130618 - DNA, 25 bp, Homo sapien
agggtcctatttgcataccgtccct

SEQ ID NO: 130619 - DNA, 25 bp, Homo sapien
cggggttgtcagttcgaaggatccc

SEQ ID NO: 130620 - DNA, 25 bp, Homo sapien
cggggttgtcagatcgaaggatccc

SEQ ID NO: 130621 - DNA, 25 bp, Homo sapien
tgtttgtggaacgacagaggttacc

SEQ ID NO: 130622 - DNA, 25 bp, Homo sapien
tgtttgtggaaccacagaggttacc

SEQ ID NO: 130623 - DNA, 25 bp, Homo sapien
ggtactgtggcaaacgattaccctc

SEQ ID NO: 130624 - DNA, 25 bp, Homo sapien
ggtactgtggcatacgattaccctc

SEQ ID NO: 130625 - DNA, 25 bp, Homo sapien
gtgtacaagggagagtgcgaccacc

SEQ ID NO: 130626 - DNA, 25 bp, Homo sapien
gtgtacaagggacagtgcgaccacc

SEQ ID NO: 130627 - DNA, 25 bp, Homo sapien
ctcccgcggtgtgtcgtgactcaga

SEQ ID NO: 130628 - DNA, 25 bp, Homo sapien
ctcccgcggtgtctcgtgactcaga

SEQ ID NO: 130629 - DNA, 25 bp, Homo sapien
cattggtggtgacgactacctcggt

SEQ ID NO: 130630 - DNA, 25 bp, Homo sapien
cattggtggtgaggactacctcggt

SEQ ID NO: 130631 - DNA, 25 bp, Homo sapien
ctagttgagggtcagtccctcgggt

SEQ ID NO: 130632 - DNA, 25 bp, Homo sapien
ctagttgagggtgagtccctcgggt

SEQ ID NO: 130633 - DNA, 25 bp, Homo sapien
cacttattagggtgaaatccgttgt

SEQ ID NO: 130634 - DNA, 25 bp, Homo sapien
cacttattagggagaaatccgttgt

SEQ ID NO: 130635 - DNA, 25 bp, Homo sapien
attacagtcatgtattgtcactgat

SEQ ID NO: 130636 - DNA, 25 bp, Homo sapien
attacagtcatgaattgtcactgat

SEQ ID NO: 130637 - DNA, 25 bp, Homo sapien
tctcgcttgactctaatcgtcagga

SEQ ID NO: 130638 - DNA, 25 bp, Homo sapien
tctcgcttgactgtaatcgtcagga

SEQ ID NO: 130639 - DNA, 25 bp, Homo sapien
gtcccggcgacctctatcctgttag

SEQ ID NO: 130640 - DNA, 25 bp, Homo sapien
gtcccggcgaccactatcctgttag

SEQ ID NO: 130641 - DNA, 25 bp, Homo sapien
ttctaaagtgtgtgtccctttctgt

SEQ ID NO: 130642 - DNA, 25 bp, Homo sapien
ttctaaagtgtgagtccctttctgt

SEQ ID NO: 130643 - DNA, 25 bp, Homo sapien
ctgtgaggttcgaccctaccgtttc

SEQ ID NO: 130644 - DNA, 25 bp, Homo sapien
ctgtgaggttcgtccctaccgtttc

SEQ ID NO: 130645 - DNA, 25 bp, Homo sapien
cctctgggttcgtctccgaccctcc

SEQ ID NO: 130646 - DNA, 25 bp, Homo sapien
cctctgggttcgactccgaccctcc

SEQ ID NO: 130647 - DNA, 25 bp, Homo sapien
gttctcctagaacttcagaccattg

SEQ ID NO: 130648 - DNA, 25 bp, Homo sapien
gttctcctagaagttcagaccattg

SEQ ID NO: 130649 - DNA, 25 bp, Homo sapien
ggagtgagagtgtacccaagagact

SEQ ID NO: 130650 - DNA, 25 bp, Homo sapien
ggagtgagagtgaacccaagagact

SEQ ID NO: 130651 - DNA, 25 bp, Homo sapien
ggaggtcgtacgacccacgactaaa

SEQ ID NO: 130652 - DNA, 25 bp, Homo sapien
ggaggtcgtacgtcccacgactaaa

SEQ ID NO: 130653 - DNA, 25 bp, Homo sapien
actcgtgtctattcccgaggaaagt

SEQ ID NO: 130654 - DNA, 25 bp, Homo sapien
actcgtgtctatacccgaggaaagt

SEQ ID NO: 130655 - DNA, 25 bp, Homo sapien
gccgtagggtgtttacccgggaaat

SEQ ID NO: 130656 - DNA, 25 bp, Homo sapien
gccgtagggtgtatacccgggaaat

SEQ ID NO: 130657 - DNA, 25 bp, Homo sapien
catcgacggggaacaggtcgagacc

SEQ ID NO: 130658 - DNA, 25 bp, Homo sapien
catcgacggggatcaggtcgagacc

SEQ ID NO: 130659 - DNA, 25 bp, Homo sapien
gaccgggcgcacgacaccgacaggt

SEQ ID NO: 130660 - DNA, 25 bp, Homo sapien
gaccgggcgcaccacaccgacaggt

SEQ ID NO: 130661 - DNA, 25 bp, Homo sapien
gacgcgggcgctttacgcgcggtga

SEQ ID NO: 130662 - DNA, 25 bp, Homo sapien
gacgcgggcgctatacgcgcggtga

SEQ ID NO: 130663 - DNA, 25 bp, Homo sapien
cgaagagcggccaaagggacgacta

SEQ ID NO: 130664 - DNA, 25 bp, Homo sapien
cgaagagcggcctaagggacgacta

SEQ ID NO: 130665 - DNA, 25 bp, Homo sapien
cagtaccggaggactgacgatataa

SEQ ID NO: 130666 - DNA, 25 bp, Homo sapien
cagtaccggaggtctgacgatataa

SEQ ID NO: 130667 - DNA, 25 bp, Homo sapien
aaacttcggatctcggacgaataag

SEQ ID NO: 130668 - DNA, 25 bp, Homo sapien
aaacttcggatcacggacgaataag

SEQ ID NO: 130669 - DNA, 25 bp, Homo sapien
cagaggaagttcacgggacatatag

SEQ ID NO: 130670 - DNA, 25 bp, Homo sapien
cagaggaagttctcgggacatatag

SEQ ID NO: 130671 - DNA, 25 bp, Homo sapien
aatgtcgttatttctaccattaggt

SEQ ID NO: 130672 - DNA, 25 bp, Homo sapien
aatgtcgttattactaccattaggt

SEQ ID NO: 130673 - DNA, 25 bp, Homo sapien
gaggtgacacttactacaatgagtg

SEQ ID NO: 130674 - DNA, 25 bp, Homo sapien
gaggtgacactttctacaatgagtg

SEQ ID NO: 130675 - DNA, 25 bp, Homo sapien
cgggtacggttgtttcctcatgatt

SEQ ID NO: 130676 - DNA, 25 bp, Homo sapien
cgggtacggttgattcctcatgatt

SEQ ID NO: 130677 - DNA, 25 bp, Homo sapien
caaggggttacgactcctcctggac

SEQ ID NO: 130678 - DNA, 25 bp, Homo sapien
caaggggttacgtctcctcctggac

SEQ ID NO: 130679 - DNA, 25 bp, Homo sapien
gagagggtgacgaactgcgtcccaa

SEQ ID NO: 130680 - DNA, 25 bp, Homo sapien
gagagggtgacgtactgcgtcccaa

SEQ ID NO: 130681 - DNA, 25 bp, Homo sapien
cgagattctacctctgagtgcggaa

SEQ ID NO: 130682 - DNA, 25 bp, Homo sapien
cgagattctaccactgagtgcggaa

SEQ ID NO: 130683 - DNA, 25 bp, Homo sapien
atataatgttctctgatatacggaa

SEQ ID NO: 130684 - DNA, 25 bp, Homo sapien
atataatgttctgtgatatacggaa

SEQ ID NO: 130685 - DNA, 25 bp, Homo sapien
atatttttcgtcattcagacagatg

SEQ ID NO: 130686 - DNA, 25 bp, Homo sapien
atatttttcgtctttcagacagatg

SEQ ID NO: 130687 - DNA, 25 bp, Homo sapien
atatccaatacttatcgacacggtg

SEQ ID NO: 130688 - DNA, 25 bp, Homo sapien
atatccaatactaatcgacacggtg

SEQ ID NO: 130689 - DNA, 25 bp, Homo sapien
gagtactaccaaagaagtccctctc

SEQ ID NO: 130690 - DNA, 25 bp, Homo sapien
gagtactaccaatgaagtccctctc

SEQ ID NO: 130691 - DNA, 25 bp, Homo sapien
cggtgtccacaggactgtcccttgt

SEQ ID NO: 130692 - DNA, 25 bp, Homo sapien
cggtgtccacagcactgtcccttgt

SEQ ID NO: 130693 - DNA, 25 bp, Homo sapien
ggtggtgtttcaatagatcccttct

SEQ ID NO: 130694 - DNA, 25 bp, Homo sapien
ggtggtgtttcattagatcccttct

SEQ ID NO: 130695 - DNA, 25 bp, Homo sapien
aaggttttcctttagaaacctctag

SEQ ID NO: 130696 - DNA, 25 bp, Homo sapien
aaggttttccttaagaaacctctag

SEQ ID NO: 130697 - DNA, 25 bp, Homo sapien
ggatctgacactagaactgactcta

SEQ ID NO: 130698 - DNA, 25 bp, Homo sapien
ggatctgacacttgaactgactcta

SEQ ID NO: 130699 - DNA, 25 bp, Homo sapien
ggtccatgaggtgagactggtacta

SEQ ID NO: 130700 - DNA, 25 bp, Homo sapien
ggtccatgaggtcagactggtacta

SEQ ID NO: 130701 - DNA, 25 bp, Homo sapien
ggagtaagggtacactagactagac

SEQ ID NO: 130702 - DNA, 25 bp, Homo sapien
ggagtaagggtagactagactagac

SEQ ID NO: 130703 - DNA, 25 bp, Homo sapien
gttatagaagtacgtgagctacgac

SEQ ID NO: 130704 - DNA, 25 bp, Homo sapien
gttatagaagtaggtgagctacgac

SEQ ID NO: 130705 - DNA, 25 bp, Homo sapien
ttatcagtgttttctttgactgtca

SEQ ID NO: 130706 - DNA, 25 bp, Homo sapien
ttatcagtgtttactttgactgtca

SEQ ID NO: 130707 - DNA, 25 bp, Homo sapien
atacaacttttcattcgtgcttaca

SEQ ID NO: 130708 - DNA, 25 bp, Homo sapien
atacaacttttctttcgtgcttaca

SEQ ID NO: 130709 - DNA, 25 bp, Homo sapien
tcccgtgtctcctccgtcgtatgtt

SEQ ID NO: 130710 - DNA, 25 bp, Homo sapien
tcccgtgtctccaccgtcgtatgtt

SEQ ID NO: 130711 - DNA, 25 bp, Homo sapien
actttacttccgaggacgtgtcggt

SEQ ID NO: 130712 - DNA, 25 bp, Homo sapien
actttacttccgtggacgtgtcggt

SEQ ID NO: 130713 - DNA, 25 bp, Homo sapien
atgtgacttcgtgtgtaccggttgt

SEQ ID NO: 130714 - DNA, 25 bp, Homo sapien
atgtgacttcgtctgtaccggttgt

SEQ ID NO: 130715 - DNA, 25 bp, Homo sapien
taatacgtattttcagacacgtttg

SEQ ID NO: 130716 - DNA, 25 bp, Homo sapien
taatacgtatttacagacacgtttg

SEQ ID NO: 130717 - DNA, 25 bp, Homo sapien
gacacttgaattagtgtactcaaga

SEQ ID NO: 130718 - DNA, 25 bp, Homo sapien
gacacttgaatttgtgtactcaaga

SEQ ID NO: 130719 - DNA, 25 bp, Homo sapien
ggacaccaagaaattaacccacgac

SEQ ID NO: 130720 - DNA, 25 bp, Homo sapien
ggacaccaagaatttaacccacgac

SEQ ID NO: 130721 - DNA, 25 bp, Homo sapien
ggcaatgtaacactgtacaattaaa

SEQ ID NO: 130722 - DNA, 25 bp, Homo sapien
ggcaatgtaacagtgtacaattaaa

SEQ ID NO: 130723 - DNA, 25 bp, Homo sapien
gacaaaggtcatgtagtcaaacgaa

SEQ ID NO: 130724 - DNA, 25 bp, Homo sapien
gacaaaggtcatctagtcaaacgaa

SEQ ID NO: 130725 - DNA, 25 bp, Homo sapien
taaaggatctaacgaatgttacttc

SEQ ID NO: 130726 - DNA, 25 bp, Homo sapien
taaaggatctaaggaatgttacttc

SEQ ID NO: 130727 - DNA, 25 bp, Homo sapien
atggatatctaagtatatttccgtc

SEQ ID NO: 130728 - DNA, 25 bp, Homo sapien
atggatatctaactatatttccgtc

SEQ ID NO: 130729 - DNA, 25 bp, Homo sapien
ggattgagacaatactttttacctc

SEQ ID NO: 130730 - DNA, 25 bp, Homo sapien
ggattgagacaaaactttttacctc

SEQ ID NO: 130731 - DNA, 25 bp, Homo sapien
gacggaccagattccttcgaccgtc

SEQ ID NO: 130732 - DNA, 25 bp, Homo sapien
gacggaccagataccttcgaccgtc

SEQ ID NO: 130733 - DNA, 25 bp, Homo sapien
gtgtggaccaagaccagccggtagt

SEQ ID NO: 130734 - DNA, 25 bp, Homo sapien
gtgtggaccaagtccagccggtagt

SEQ ID NO: 130735 - DNA, 25 bp, Homo sapien
tctcggcgcagacgacaccggcaga

SEQ ID NO: 130736 - DNA, 25 bp, Homo sapien
tctcggcgcagaggacaccggcaga

SEQ ID NO: 130737 - DNA, 25 bp, Homo sapien
tctcttttctaagagagtcgcaaca

SEQ ID NO: 130738 - DNA, 25 bp, Homo sapien
tctcttttctaacagagtcgcaaca

SEQ ID NO: 130739 - DNA, 25 bp, Homo sapien
gtcacatgttatctgaggtgaccga

SEQ ID NO: 130740 - DNA, 25 bp, Homo sapien
gtcacatgttatgtgaggtgaccga

SEQ ID NO: 130741 - DNA, 25 bp, Homo sapien
acaatgacgtcttggacggttcaga

SEQ ID NO: 130742 - DNA, 25 bp, Homo sapien
acaatgacgtctaggacggttcaga

SEQ ID NO: 130743 - DNA, 25 bp, Homo sapien
aacggatgatctgtgtcatcaagtt

SEQ ID NO: 130744 - DNA, 25 bp, Homo sapien
aacggatgatctctgtcatcaagtt

SEQ ID NO: 130745 - DNA, 25 bp, Homo sapien
gtccagggtctttcgcagacggtag

SEQ ID NO: 130746 - DNA, 25 bp, Homo sapien
gtccagggtcttacgcagacggtag

SEQ ID NO: 130747 - DNA, 25 bp, Homo sapien
caccatcgtttgacccgtcgtagta

SEQ ID NO: 130748 - DNA, 25 bp, Homo sapien
caccatcgtttgtcccgtcgtagta

SEQ ID NO: 130749 - DNA, 25 bp, Homo sapien
tttcccatgtctacctctccggatg

SEQ ID NO: 130750 - DNA, 25 bp, Homo sapien
tttcccatgtcttcctctccggatg

SEQ ID NO: 130751 - DNA, 25 bp, Homo sapien
cctcgtctccggtctactgggaagt

SEQ ID NO: 130752 - DNA, 25 bp, Homo sapien
cctcgtctccggactactgggaagt

SEQ ID NO: 130753 - DNA, 25 bp, Homo sapien
tactacggctgatccgggtcgtggt

SEQ ID NO: 130754 - DNA, 25 bp, Homo sapien
tactacggctgaaccgggtcgtggt

SEQ ID NO: 130755 - DNA, 25 bp, Homo sapien
accactccggtttcggtgtgacttt

SEQ ID NO: 130756 - DNA, 25 bp, Homo sapien
accactccggttacggtgtgacttt

SEQ ID NO: 130757 - DNA, 25 bp, Homo sapien
gaaccggacgtcgttgtgtccactg

SEQ ID NO: 130758 - DNA, 25 bp, Homo sapien
gaaccggacgtccttgtgtccactg

SEQ ID NO: 130759 - DNA, 25 bp, Homo sapien
aggaagtctactcgtaatcgtcccc

SEQ ID NO: 130760 - DNA, 25 bp, Homo sapien
aggaagtctactggtaatcgtcccc

SEQ ID NO: 130761 - DNA, 25 bp, Homo sapien
agagggaagtttagaggtctcgccc

SEQ ID NO: 130762 - DNA, 25 bp, Homo sapien
agagggaagttttgaggtctcgccc

SEQ ID NO: 130763 - DNA, 25 bp, Homo sapien
tctccgtctctaagtaccggtcgtc

SEQ ID NO: 130764 - DNA, 25 bp, Homo sapien
tctccgtctctatgtaccggtcgtc

SEQ ID NO: 130765 - DNA, 25 bp, Homo sapien
ctggaacatcggtgatgcgtggtcc

SEQ ID NO: 130766 - DNA, 25 bp, Homo sapien
ctggaacatcggagatgcgtggtcc

SEQ ID NO: 130767 - DNA, 25 bp, Homo sapien
ggaccttcggtactcgggtgtccga

SEQ ID NO: 130768 - DNA, 25 bp, Homo sapien
ggaccttcggtagtcgggtgtccga

SEQ ID NO: 130769 - DNA, 25 bp, Homo sapien
gcttgtatatgtgtacgtctgtaca

SEQ ID NO: 130770 - DNA, 25 bp, Homo sapien
gcttgtatatgtctacgtctgtaca

SEQ ID NO: 130771 - DNA, 25 bp, Homo sapien
aagtcttcgaacttgtcatcttgat

SEQ ID NO: 130772 - DNA, 25 bp, Homo sapien
aagtcttcgaacatgtcatcttgat

SEQ ID NO: 130773 - DNA, 25 bp, Homo sapien
aaccgttagcaaaagcattctcagt

SEQ ID NO: 130774 - DNA, 25 bp, Homo sapien
aaccgttagcaatagcattctcagt

SEQ ID NO: 130775 - DNA, 25 bp, Homo sapien
ccacttagcacagaggagcttgtgt

SEQ ID NO: 130776 - DNA, 25 bp, Homo sapien
ccacttagcacacaggagcttgtgt

SEQ ID NO: 130777 - DNA, 25 bp, Homo sapien
caggaagtacacaatgctaacatgg

SEQ ID NO: 130778 - DNA, 25 bp, Homo sapien
caggaagtacactatgctaacatgg

SEQ ID NO: 130779 - DNA, 25 bp, Homo sapien
aaagactacagatgagtcacatgtc

SEQ ID NO: 130780 - DNA, 25 bp, Homo sapien
aaagactacagaagagtcacatgtc

SEQ ID NO: 130781 - DNA, 25 bp, Homo sapien
cgaggtagccgaacaggaccccgac

SEQ ID NO: 130782 - DNA, 25 bp, Homo sapien
cgaggtagccgatcaggaccccgac

SEQ ID NO: 130783 - DNA, 25 bp, Homo sapien
agggaggttcaacgacgggacaaca

SEQ ID NO: 130784 - DNA, 25 bp, Homo sapien
agggaggttcaaggacgggacaaca

SEQ ID NO: 130785 - DNA, 25 bp, Homo sapien
cagaagggtcactaggtggagaaca

SEQ ID NO: 130786 - DNA, 25 bp, Homo sapien
cagaagggtcacaaggtggagaaca

SEQ ID NO: 130787 - DNA, 25 bp, Homo sapien
aagaaaggaccagagtgaggacctg

SEQ ID NO: 130788 - DNA, 25 bp, Homo sapien
aagaaaggaccacagtgaggacctg

SEQ ID NO: 130789 - DNA, 25 bp, Homo sapien
actaaactcaccagttcctgaaggc

SEQ ID NO: 130790 - DNA, 25 bp, Homo sapien
actaaactcacctgttcctgaaggc

SEQ ID NO: 130791 - DNA, 25 bp, Homo sapien
tttagaaacctctagccaaatgacg

SEQ ID NO: 130792 - DNA, 25 bp, Homo sapien
tttagaaacctcaagccaaatgacg

SEQ ID NO: 130793 - DNA, 25 bp, Homo sapien
taagcgtacccgaggcttcgagaca

SEQ ID NO: 130794 - DNA, 25 bp, Homo sapien
taagcgtacccgtggcttcgagaca

SEQ ID NO: 130795 - DNA, 25 bp, Homo sapien
cgaagcttctgattgtccgggtgta

SEQ ID NO: 130796 - DNA, 25 bp, Homo sapien
cgaagcttctgaatgtccgggtgta

SEQ ID NO: 130797 - DNA, 25 bp, Homo sapien
aggtcggacctgacctcaggattct

SEQ ID NO: 130798 - DNA, 25 bp, Homo sapien
aggtcggacctgtcctcaggattct

SEQ ID NO: 130799 - DNA, 25 bp, Homo sapien
ggggacactggtgtcgtattactta

SEQ ID NO: 130800 - DNA, 25 bp, Homo sapien
ggggacactggtctcgtattactta

SEQ ID NO: 130801 - DNA, 25 bp, Homo sapien
tggttctactactcccactagggaa

SEQ ID NO: 130802 - DNA, 25 bp, Homo sapien
tggttctactacacccactagggaa

SEQ ID NO: 130803 - DNA, 25 bp, Homo sapien
ttttactgtcttagcactggaggta

SEQ ID NO: 130804 - DNA, 25 bp, Homo sapien
ttttactgtctttgcactggaggta

SEQ ID NO: 130805 - DNA, 25 bp, Homo sapien
attttctgtcttttcaccggacttg

SEQ ID NO: 130806 - DNA, 25 bp, Homo sapien
attttctgtcttatcaccggacttg

SEQ ID NO: 130807 - DNA, 25 bp, Homo sapien
tttactgtttgaaaaccgagtattc

SEQ ID NO: 130808 - DNA, 25 bp, Homo sapien
tttactgtttgataaccgagtattc

SEQ ID NO: 130809 - DNA, 25 bp, Homo sapien
gtaaattggatcgtgtctatctacg

SEQ ID NO: 130810 - DNA, 25 bp, Homo sapien
gtaaattggatcctgtctatctacg

SEQ ID NO: 130811 - DNA, 25 bp, Homo sapien
atcatgtcaatacgagtctacttgt

SEQ ID NO: 130812 - DNA, 25 bp, Homo sapien
atcatgtcaataggagtctacttgt

SEQ ID NO: 130813 - DNA, 25 bp, Homo sapien
gggtacgcggtcacacccgtttccg

SEQ ID NO: 130814 - DNA, 25 bp, Homo sapien
gggtacgcggtctcacccgtttccg

SEQ ID NO: 130815 - DNA, 25 bp, Homo sapien
gagagtcctctataagtttcactct

SEQ ID NO: 130816 - DNA, 25 bp, Homo sapien
gagagtcctctaaaagtttcactct

SEQ ID NO: 130817 - DNA, 25 bp, Homo sapien
ttatccttagagaaggtgtctccgt

SEQ ID NO: 130818 - DNA, 25 bp, Homo sapien
ttatccttagagtaggtgtctccgt

SEQ ID NO: 130819 - DNA, 25 bp, Homo sapien
accgttgtctaaaacaagttcaccg

SEQ ID NO: 130820 - DNA, 25 bp, Homo sapien
accgttgtctaatacaagttcaccg

SEQ ID NO: 130821 - DNA, 25 bp, Homo sapien
acactctgctatgattgttttctcg

SEQ ID NO: 130822 - DNA, 25 bp, Homo sapien
acactctgctatcattgttttctcg

SEQ ID NO: 130823 - DNA, 25 bp, Homo sapien
ctcgtgtctgcctgtgtgcacctcg

SEQ ID NO: 130824 - DNA, 25 bp, Homo sapien
ctcgtgtctgccagtgtgcacctcg

SEQ ID NO: 130825 - DNA, 25 bp, Homo sapien
ttctgtcggttcaggtgttattacg

SEQ ID NO: 130826 - DNA, 25 bp, Homo sapien
ttctgtcggttctggtgttattacg

SEQ ID NO: 130827 - DNA, 25 bp, Homo sapien
tgacgtagtgtctgttctagtgtct

SEQ ID NO: 130828 - DNA, 25 bp, Homo sapien
tgacgtagtgtcagttctagtgtct

SEQ ID NO: 130829 - DNA, 25 bp, Homo sapien
ctcgccgacgacttcctgtaggtct

SEQ ID NO: 130830 - DNA, 25 bp, Homo sapien
ctcgccgacgacatcctgtaggtct

SEQ ID NO: 130831 - DNA, 25 bp, Homo sapien
gacctggcgagaaggtcttatctct

SEQ ID NO: 130832 - DNA, 25 bp, Homo sapien
gacctggcgagatggtcttatctct

SEQ ID NO: 130833 - DNA, 25 bp, Homo sapien
ggactaagtcgaatcacttctattc

SEQ ID NO: 130834 - DNA, 25 bp, Homo sapien
ggactaagtcgattcacttctattc

SEQ ID NO: 130835 - DNA, 25 bp, Homo sapien
tgatataaaacttcgacttttcact

SEQ ID NO: 130836 - DNA, 25 bp, Homo sapien
tgatataaaactacgacttttcact

SEQ ID NO: 130837 - DNA, 25 bp, Homo sapien
ccgtttacgaaagagtcttcgtttt

SEQ ID NO: 130838 - DNA, 25 bp, Homo sapien
ccgtttacgaaacagtcttcgtttt

SEQ ID NO: 130839 - DNA, 25 bp, Homo sapien
tgtccgttcaacaagtggagtttct

SEQ ID NO: 130840 - DNA, 25 bp, Homo sapien
tgtccgttcaactagtggagtttct

SEQ ID NO: 130841 - DNA, 25 bp, Homo sapien
tacttcggtcttcagaagtttttct

SEQ ID NO: 130842 - DNA, 25 bp, Homo sapien
tacttcggtcttgagaagtttttct

SEQ ID NO: 130843 - DNA, 25 bp, Homo sapien
atcttgagcccgaacatcatcctct

SEQ ID NO: 130844 - DNA, 25 bp, Homo sapien
atcttgagcccgtacatcatcctct

SEQ ID NO: 130845 - DNA, 25 bp, Homo sapien
gcccgtttggcgaacagccgtttct

SEQ ID NO: 130846 - DNA, 25 bp, Homo sapien
gcccgtttggcgtacagccgtttct

SEQ ID NO: 130847 - DNA, 25 bp, Homo sapien
gttttcccgtttcgaaactcaattg

SEQ ID NO: 130848 - DNA, 25 bp, Homo sapien
gttttcccgtttggaaactcaattg

SEQ ID NO: 130849 - DNA, 25 bp, Homo sapien
ttgcagttttggacggtcttattct

SEQ ID NO: 130850 - DNA, 25 bp, Homo sapien
ttgcagttttggtcggtcttattct

SEQ ID NO: 130851 - DNA, 25 bp, Homo sapien
gtttccgacctttcgtgacacattt

SEQ ID NO: 130852 - DNA, 25 bp, Homo sapien
gtttccgaccttacgtgacacattt

SEQ ID NO: 130853 - DNA, 25 bp, Homo sapien
ctgacccggtccttcggttccattt

SEQ ID NO: 130854 - DNA, 25 bp, Homo sapien
ctgacccggtccatcggttccattt

SEQ ID NO: 130855 - DNA, 25 bp, Homo sapien
tacggcaggtacgacgtgctcatgt

SEQ ID NO: 130856 - DNA, 25 bp, Homo sapien
tacggcaggtaccacgtgctcatgt

SEQ ID NO: 130857 - DNA, 25 bp, Homo sapien
gacctcctcgggtccatatgttagg

SEQ ID NO: 130858 - DNA, 25 bp, Homo sapien
gacctcctcgggaccatatgttagg

SEQ ID NO: 130859 - DNA, 25 bp, Homo sapien
cggacgtagggtctcgctccttgag

SEQ ID NO: 130860 - DNA, 25 bp, Homo sapien
cggacgtagggtgtcgctccttgag

SEQ ID NO: 130861 - DNA, 25 bp, Homo sapien
cttcgtagggtcctgctccctcgat

SEQ ID NO: 130862 - DNA, 25 bp, Homo sapien
cttcgtagggtcgtgctccctcgat

SEQ ID NO: 130863 - DNA, 25 bp, Homo sapien
accgcgacgggctgtgactccaaga

SEQ ID NO: 130864 - DNA, 25 bp, Homo sapien
accgcgacgggcagtgactccaaga

SEQ ID NO: 130865 - DNA, 25 bp, Homo sapien
actcggagaaccatcgacgccgaaa

SEQ ID NO: 130866 - DNA, 25 bp, Homo sapien
actcggagaaccttcgacgccgaaa

SEQ ID NO: 130867 - DNA, 25 bp, Homo sapien
tactgatccgactgggtcagaatag

SEQ ID NO: 130868 - DNA, 25 bp, Homo sapien
tactgatccgacagggtcagaatag

SEQ ID NO: 130869 - DNA, 25 bp, Homo sapien
agtagtcagacgtgtgcgagatcct

SEQ ID NO: 130870 - DNA, 25 bp, Homo sapien
agtagtcagacgagtgcgagatcct

SEQ ID NO: 130871 - DNA, 25 bp, Homo sapien
agtcgactgataagtacaacaaact

SEQ ID NO: 130872 - DNA, 25 bp, Homo sapien
agtcgactgatatgtacaacaaact

SEQ ID NO: 130873 - DNA, 25 bp, Homo sapien
gggactcgggtcttctcatacacaa

SEQ ID NO: 130874 - DNA, 25 bp, Homo sapien
gggactcgggtcatctcatacacaa

SEQ ID NO: 130875 - DNA, 25 bp, Homo sapien
cggtcctacggcttccgaggccagt

SEQ ID NO: 130876 - DNA, 25 bp, Homo sapien
cggtcctacggcatccgaggccagt

SEQ ID NO: 130877 - DNA, 25 bp, Homo sapien
tcgggtcccgaccacgctgtgggac

SEQ ID NO: 130878 - DNA, 25 bp, Homo sapien
tcgggtcccgacgacgctgtgggac

SEQ ID NO: 130879 - DNA, 25 bp, Homo sapien
tcaggtgtctggtccacttccggat

SEQ ID NO: 130880 - DNA, 25 bp, Homo sapien
tcaggtgtctggaccacttccggat

SEQ ID NO: 130881 - DNA, 25 bp, Homo sapien
tgcggacgtccaaagccgtttcttt

SEQ ID NO: 130882 - DNA, 25 bp, Homo sapien
tgcggacgtccatagccgtttcttt

SEQ ID NO: 130883 - DNA, 25 bp, Homo sapien
cgttctcatccactggtcaacatgg

SEQ ID NO: 130884 - DNA, 25 bp, Homo sapien
cgttctcatccagtggtcaacatgg

SEQ ID NO: 130885 - DNA, 25 bp, Homo sapien
aagttctattcgatcactgacagtg

SEQ ID NO: 130886 - DNA, 25 bp, Homo sapien
aagttctattcgttcactgacagtg

SEQ ID NO: 130887 - DNA, 25 bp, Homo sapien
ttcctgttcccactgtctctgttta

SEQ ID NO: 130888 - DNA, 25 bp, Homo sapien
ttcctgttcccagtgtctctgttta

SEQ ID NO: 130889 - DNA, 25 bp, Homo sapien
cagctgccaccgttacttgtcgttc

SEQ ID NO: 130890 - DNA, 25 bp, Homo sapien
cagctgccaccgatacttgtcgttc

SEQ ID NO: 130891 - DNA, 25 bp, Homo sapien
acccacgttcccacgatgtgtagtg

SEQ ID NO: 130892 - DNA, 25 bp, Homo sapien
acccacgttccctcgatgtgtagtg

SEQ ID NO: 130893 - DNA, 25 bp, Homo sapien
cactgaagtccgtctccagtggtgg

SEQ ID NO: 130894 - DNA, 25 bp, Homo sapien
cactgaagtccgactccagtggtgg

SEQ ID NO: 130895 - DNA, 25 bp, Homo sapien
ctgtgcatccagtccgagtggtcgc

SEQ ID NO: 130896 - DNA, 25 bp, Homo sapien
ctgtgcatccagaccgagtggtcgc

SEQ ID NO: 130897 - DNA, 25 bp, Homo sapien
tcggacacccggaagtctcgggccg

SEQ ID NO: 130898 - DNA, 25 bp, Homo sapien
tcggacacccggtagtctcgggccg

SEQ ID NO: 130899 - DNA, 25 bp, Homo sapien
aattcccgcgggaactatgtggccg

SEQ ID NO: 130900 - DNA, 25 bp, Homo sapien
aattcccgcgggtactatgtggccg

SEQ ID NO: 130901 - DNA, 25 bp, Homo sapien
ggtcctagcgggactgtacccgaac

SEQ ID NO: 130902 - DNA, 25 bp, Homo sapien
ggtcctagcgggtctgtacccgaac

SEQ ID NO: 130903 - DNA, 25 bp, Homo sapien
ggactcagggggttcgtctcccgtc

SEQ ID NO: 130904 - DNA, 25 bp, Homo sapien
ggactcagggggatcgtctcccgtc

SEQ ID NO: 130905 - DNA, 25 bp, Homo sapien
tgtcctcagggtctgtcgtcttgtt

SEQ ID NO: 130906 - DNA, 25 bp, Homo sapien
tgtcctcagggtgtgtcgtcttgtt

SEQ ID NO: 130907 - DNA, 25 bp, Homo sapien
tgtcatgtgggtgtatctctgtgtc

SEQ ID NO: 130908 - DNA, 25 bp, Homo sapien
tgtcatgtgggtctatctctgtgtc

SEQ ID NO: 130909 - DNA, 25 bp, Homo sapien
gtccagtagggttatattcgctgca

SEQ ID NO: 130910 - DNA, 25 bp, Homo sapien
gtccagtagggtaatattcgctgca

SEQ ID NO: 130911 - DNA, 25 bp, Homo sapien
gctgtagacggttgtacacagggaa

SEQ ID NO: 130912 - DNA, 25 bp, Homo sapien
gctgtagacggtagtacacagggaa

SEQ ID NO: 130913 - DNA, 25 bp, Homo sapien
agagccccagtatccggagggtcgc

SEQ ID NO: 130914 - DNA, 25 bp, Homo sapien
agagccccagtaaccggagggtcgc

SEQ ID NO: 130915 - DNA, 25 bp, Homo sapien
gtgggtcgaacaaccgtttatggag

SEQ ID NO: 130916 - DNA, 25 bp, Homo sapien
gtgggtcgaacatccgtttatggag

SEQ ID NO: 130917 - DNA, 25 bp, Homo sapien
gtcggggaatagtctctcttgtgtg

SEQ ID NO: 130918 - DNA, 25 bp, Homo sapien
gtcggggaatagactctcttgtgtg

SEQ ID NO: 130919 - DNA, 25 bp, Homo sapien
cggagagaagtcgaacttataattc

SEQ ID NO: 130920 - DNA, 25 bp, Homo sapien
cggagagaagtccaacttataattc

SEQ ID NO: 130921 - DNA, 25 bp, Homo sapien
gaagtcaacgtcgaacaggtggtcc

SEQ ID NO: 130922 - DNA, 25 bp, Homo sapien
gaagtcaacgtccaacaggtggtcc

SEQ ID NO: 130923 - DNA, 25 bp, Homo sapien
tctactgcacggtgactttatccgt

SEQ ID NO: 130924 - DNA, 25 bp, Homo sapien
tctactgcacggagactttatccgt

SEQ ID NO: 130925 - DNA, 25 bp, Homo sapien
gggctatctctctaatcttttcagt

SEQ ID NO: 130926 - DNA, 25 bp, Homo sapien
gggctatctctcaaatcttttcagt

SEQ ID NO: 130927 - DNA, 25 bp, Homo sapien
ggttcagtccagaaataactttcac

SEQ ID NO: 130928 - DNA, 25 bp, Homo sapien
ggttcagtccagtaataactttcac

SEQ ID NO: 130929 - DNA, 25 bp, Homo sapien
atggaaaattcgtaaagtaccccac

SEQ ID NO: 130930 - DNA, 25 bp, Homo sapien
atggaaaattcgaaaagtaccccac

SEQ ID NO: 130931 - DNA, 25 bp, Homo sapien
gccggaaattccaacaacgaaaact

SEQ ID NO: 130932 - DNA, 25 bp, Homo sapien
gccggaaattcctacaacgaaaact

SEQ ID NO: 130933 - DNA, 25 bp, Homo sapien
cttgacatgtcgactcaaacatcga

SEQ ID NO: 130934 - DNA, 25 bp, Homo sapien
cttgacatgtcgtctcaaacatcga

SEQ ID NO: 130935 - DNA, 25 bp, Homo sapien
ctgattaagatgtctatcgacattc

SEQ ID NO: 130936 - DNA, 25 bp, Homo sapien
ctgattaagatgactatcgacattc

SEQ ID NO: 130937 - DNA, 25 bp, Homo sapien
taccataagatgtccccgacgactc

SEQ ID NO: 130938 - DNA, 25 bp, Homo sapien
taccataagatgaccccgacgactc

SEQ ID NO: 130939 - DNA, 25 bp, Homo sapien
cccggaacaggtttcagtcctagtc

SEQ ID NO: 130940 - DNA, 25 bp, Homo sapien
cccggaacaggtatcagtcctagtc

SEQ ID NO: 130941 - DNA, 25 bp, Homo sapien
tgtgtgacaacgacccgacgagacc

SEQ ID NO: 130942 - DNA, 25 bp, Homo sapien
tgtgtgacaacgtcccgacgagacc

SEQ ID NO: 130943 - DNA, 25 bp, Homo sapien
ggtcacagatggtcgaccgacaacc

SEQ ID NO: 130944 - DNA, 25 bp, Homo sapien
ggtcacagatggacgaccgacaacc

SEQ ID NO: 130945 - DNA, 25 bp, Homo sapien
ttccgcccgtgaggaacacgatcct

SEQ ID NO: 130946 - DNA, 25 bp, Homo sapien
ttccgcccgtgacgaacacgatcct

SEQ ID NO: 130947 - DNA, 25 bp, Homo sapien
tgattttgtctgtaaaacgtatctc

SEQ ID NO: 130948 - DNA, 25 bp, Homo sapien
tgattttgtctgaaaaacgtatctc

SEQ ID NO: 130949 - DNA, 25 bp, Homo sapien
tatttcgttctgaagagtccgggac

SEQ ID NO: 130950 - DNA, 25 bp, Homo sapien
tatttcgttctgtagagtccgggac

SEQ ID NO: 130951 - DNA, 25 bp, Homo sapien
tttttaccggtcaggtcgggtcgtg

SEQ ID NO: 130952 - DNA, 25 bp, Homo sapien
tttttaccggtctggtcgggtcgtg

SEQ ID NO: 130953 - DNA, 25 bp, Homo sapien
actgttttaccgagtccagactcga

SEQ ID NO: 130954 - DNA, 25 bp, Homo sapien
actgttttaccgtgtccagactcga

SEQ ID NO: 130955 - DNA, 25 bp, Homo sapien
gaggctctgtgaccttccacttaat

SEQ ID NO: 130956 - DNA, 25 bp, Homo sapien
gaggctctgtgagcttccacttaat

SEQ ID NO: 130957 - DNA, 25 bp, Homo sapien
ggaaactctagactacccagtttag

SEQ ID NO: 130958 - DNA, 25 bp, Homo sapien
ggaaactctagagtacccagtttag

SEQ ID NO: 130959 - DNA, 25 bp, Homo sapien
tttctacagacatcaggacggtata

SEQ ID NO: 130960 - DNA, 25 bp, Homo sapien
tttctacagacaacaggacggtata

SEQ ID NO: 130961 - DNA, 25 bp, Homo sapien
ttttcgtatccaaacggatagtata

SEQ ID NO: 130962 - DNA, 25 bp, Homo sapien
ttttcgtatccatacggatagtata

SEQ ID NO: 130963 - DNA, 25 bp, Homo sapien
ttatgtagaccgtttcgtggtctga

SEQ ID NO: 130964 - DNA, 25 bp, Homo sapien
ttatgtagaccgattcgtggtctga

SEQ ID NO: 130965 - DNA, 25 bp, Homo sapien
gttctcgtgcaggtcgttcggtcca

SEQ ID NO: 130966 - DNA, 25 bp, Homo sapien
gttctcgtgcagctcgttcggtcca

SEQ ID NO: 130967 - DNA, 25 bp, Homo sapien
gtttgagcaccgatacttacgtcta

SEQ ID NO: 130968 - DNA, 25 bp, Homo sapien
gtttgagcaccgttacttacgtcta

SEQ ID NO: 130969 - DNA, 25 bp, Homo sapien
gtatgtagataagtctctactctct

SEQ ID NO: 130970 - DNA, 25 bp, Homo sapien
gtatgtagataactctctactctct

SEQ ID NO: 130971 - DNA, 25 bp, Homo sapien
ggttttatcgaccatacattctccg

SEQ ID NO: 130972 - DNA, 25 bp, Homo sapien
ggttttatcgacgatacattctccg

SEQ ID NO: 130973 - DNA, 25 bp, Homo sapien
gagggttagtcatacaagactctcc

SEQ ID NO: 130974 - DNA, 25 bp, Homo sapien
gagggttagtcaaacaagactctcc

SEQ ID NO: 130975 - DNA, 25 bp, Homo sapien
tttagggctggaccaaagagcactc

SEQ ID NO: 130976 - DNA, 25 bp, Homo sapien
tttagggctggagcaaagagcactc

SEQ ID NO: 130977 - DNA, 25 bp, Homo sapien
gtttaggtccctgaaacaaagaatt

SEQ ID NO: 130978 - DNA, 25 bp, Homo sapien
gtttaggtccctcaaacaaagaatt

SEQ ID NO: 130979 - DNA, 25 bp, Homo sapien
taggacaacaagttaaccgaaaact

SEQ ID NO: 130980 - DNA, 25 bp, Homo sapien
taggacaacaagataaccgaaaact

SEQ ID NO: 130981 - DNA, 25 bp, Homo sapien
atggatgacactccataccataatg

SEQ ID NO: 130982 - DNA, 25 bp, Homo sapien
atggatgacactgcataccataatg

SEQ ID NO: 130983 - DNA, 25 bp, Homo sapien
tcgaaactctcttcaagaagtaatg

SEQ ID NO: 130984 - DNA, 25 bp, Homo sapien
tcgaaactctctacaagaagtaatg

SEQ ID NO: 130985 - DNA, 25 bp, Homo sapien
gcgggactcgttaacactgaaatgg

SEQ ID NO: 130986 - DNA, 25 bp, Homo sapien
gcgggactcgtttacactgaaatgg

SEQ ID NO: 130987 - DNA, 25 bp, Homo sapien
gtgtcctacagtctacacaggaaca

SEQ ID NO: 130988 - DNA, 25 bp, Homo sapien
gtgtcctacagtgtacacaggaaca

SEQ ID NO: 130989 - DNA, 25 bp, Homo sapien
gaacgtcacaatgtgatcttataca

SEQ ID NO: 130990 - DNA, 25 bp, Homo sapien
gaacgtcacaatctgatcttataca

SEQ ID NO: 130991 - DNA, 25 bp, Homo sapien
cgttccgtcaacgacactatatcgg

SEQ ID NO: 130992 - DNA, 25 bp, Homo sapien
cgttccgtcaaccacactatatcgg

SEQ ID NO: 130993 - DNA, 25 bp, Homo sapien
cgtgtgtctagatcgagacattttg

SEQ ID NO: 130994 - DNA, 25 bp, Homo sapien
cgtgtgtctagaacgagacattttg

SEQ ID NO: 130995 - DNA, 25 bp, Homo sapien
tcacgtttcacacggatgtcatatg

SEQ ID NO: 130996 - DNA, 25 bp, Homo sapien
tcacgtttcacagggatgtcatatg

SEQ ID NO: 130997 - DNA, 25 bp, Homo sapien
gagaccattctcatgataatcaatg

SEQ ID NO: 130998 - DNA, 25 bp, Homo sapien
gagaccattctcttgataatcaatg

SEQ ID NO: 130999 - DNA, 25 bp, Homo sapien
ccatcgtcgtgatacagagcaatac

SEQ ID NO: 131000 - DNA, 25 bp, Homo sapien
ccatcgtcgtgaaacagagcaatac

SEQ ID NO: 131001 - DNA, 25 bp, Homo sapien
cagtgtctttctcagggacgtaact

SEQ ID NO: 131002 - DNA, 25 bp, Homo sapien
cagtgtctttctgagggacgtaact

SEQ ID NO: 131003 - DNA, 25 bp, Homo sapien
aattcaattcttctcagggtgtcac

SEQ ID NO: 131004 - DNA, 25 bp, Homo sapien
aattcaattcttgtcagggtgtcac

SEQ ID NO: 131005 - DNA, 25 bp, Homo sapien
ttcggggtctccttgtgccggtgac

SEQ ID NO: 131006 - DNA, 25 bp, Homo sapien
ttcggggtctccatgtgccggtgac

SEQ ID NO: 131007 - DNA, 25 bp, Homo sapien
tcgtcggctcccagtggatcgagga

SEQ ID NO: 131008 - DNA, 25 bp, Homo sapien
tcgtcggctccctgtggatcgagga

SEQ ID NO: 131009 - DNA, 25 bp, Homo sapien
ttcggatccagtctcgggtcagagg

SEQ ID NO: 131010 - DNA, 25 bp, Homo sapien
ttcggatccagtgtcgggtcagagg

SEQ ID NO: 131011 - DNA, 25 bp, Homo sapien
gatctaaaggatgtcggaccaggag

SEQ ID NO: 131012 - DNA, 25 bp, Homo sapien
gatctaaaggatctcggaccaggag

SEQ ID NO: 131013 - DNA, 25 bp, Homo sapien
aagtaaagacgtctcttgaaaacac

SEQ ID NO: 131014 - DNA, 25 bp, Homo sapien
aagtaaagacgtgtcttgaaaacac

SEQ ID NO: 131015 - DNA, 25 bp, Homo sapien
gagacagtacgtcctccaatcaaat

SEQ ID NO: 131016 - DNA, 25 bp, Homo sapien
gagacagtacgtgctccaatcaaat

SEQ ID NO: 131017 - DNA, 25 bp, Homo sapien
ggattctgtcgtccacgtctcagaa

SEQ ID NO: 131018 - DNA, 25 bp, Homo sapien
ggattctgtcgtgcacgtctcagaa

SEQ ID NO: 131019 - DNA, 25 bp, Homo sapien
cggtttctgtactgttcataaagta

SEQ ID NO: 131020 - DNA, 25 bp, Homo sapien
cggtttctgtacagttcataaagta

SEQ ID NO: 131021 - DNA, 25 bp, Homo sapien
caggacctttcgatgtattcgtata

SEQ ID NO: 131022 - DNA, 25 bp, Homo sapien
caggacctttcgttgtattcgtata

SEQ ID NO: 131023 - DNA, 25 bp, Homo sapien
accaagactttgttaaaggtccgtc

SEQ ID NO: 131024 - DNA, 25 bp, Homo sapien
accaagactttgataaaggtccgtc

SEQ ID NO: 131025 - DNA, 25 bp, Homo sapien
gagggacgtatcgacaatggtcctc

SEQ ID NO: 131026 - DNA, 25 bp, Homo sapien
gagggacgtatccacaatggtcctc

SEQ ID NO: 131027 - DNA, 25 bp, Homo sapien
gctgccgaaggaactagagtctctc

SEQ ID NO: 131028 - DNA, 25 bp, Homo sapien
gctgccgaaggatctagagtctctc

SEQ ID NO: 131029 - DNA, 25 bp, Homo sapien
gtctggcaccggatcgtcgtcccag

SEQ ID NO: 131030 - DNA, 25 bp, Homo sapien
gtctggcaccggttcgtcgtcccag

SEQ ID NO: 131031 - DNA, 25 bp, Homo sapien
ttacctacgaattgtcgtgtcacaa

SEQ ID NO: 131032 - DNA, 25 bp, Homo sapien
ttacctacgaatagtcgtgtcacaa

SEQ ID NO: 131033 - DNA, 25 bp, Homo sapien
gttccatcactattaggaccagact

SEQ ID NO: 131034 - DNA, 25 bp, Homo sapien
gttccatcactaataggaccagact

SEQ ID NO: 131035 - DNA, 25 bp, Homo sapien
gcgtctgacccctgagcaagttcat

SEQ ID NO: 131036 - DNA, 25 bp, Homo sapien
gcgtctgaccccagagcaagttcat

SEQ ID NO: 131037 - DNA, 25 bp, Homo sapien
tcagagtgcagttccaatttttgac

SEQ ID NO: 131038 - DNA, 25 bp, Homo sapien
tcagagtgcagtaccaatttttgac

SEQ ID NO: 131039 - DNA, 25 bp, Homo sapien
gggcacaaccacaacgtgtctctgc

SEQ ID NO: 131040 - DNA, 25 bp, Homo sapien
gggcacaaccactacgtgtctctgc

SEQ ID NO: 131041 - DNA, 25 bp, Homo sapien
gacacgactgacattctacgtcttc

SEQ ID NO: 131042 - DNA, 25 bp, Homo sapien
gacacgactgactttctacgtcttc

SEQ ID NO: 131043 - DNA, 25 bp, Homo sapien
aacgacgtacgactaaggtcgcgga

SEQ ID NO: 131044 - DNA, 25 bp, Homo sapien
aacgacgtacgagtaaggtcgcgga

SEQ ID NO: 131045 - DNA, 25 bp, Homo sapien
cccgatgcggaacgagtcgccgtaa

SEQ ID NO: 131046 - DNA, 25 bp, Homo sapien
cccgatgcggaaggagtcgccgtaa

SEQ ID NO: 131047 - DNA, 25 bp, Homo sapien
ggcgccactcgtgctatgcccggaa

SEQ ID NO: 131048 - DNA, 25 bp, Homo sapien
ggcgccactcgtcctatgcccggaa

SEQ ID NO: 131049 - DNA, 25 bp, Homo sapien
agaccccatgtggtgcctccgggtc

SEQ ID NO: 131050 - DNA, 25 bp, Homo sapien
agaccccatgtgctgcctccgggtc

SEQ ID NO: 131051 - DNA, 25 bp, Homo sapien
acccctcgtctctccctgggagata

SEQ ID NO: 131052 - DNA, 25 bp, Homo sapien
acccctcgtctcaccctgggagata

SEQ ID NO: 131053 - DNA, 25 bp, Homo sapien
gacgaccagtcctccttacggaagg

SEQ ID NO: 131054 - DNA, 25 bp, Homo sapien
gacgaccagtccaccttacggaagg

SEQ ID NO: 131055 - DNA, 25 bp, Homo sapien
cgatctgtagtctcgatgttgaaga

SEQ ID NO: 131056 - DNA, 25 bp, Homo sapien
cgatctgtagtcacgatgttgaaga

SEQ ID NO: 131057 - DNA, 25 bp, Homo sapien
tccgaaaaaagtaggtttcgacatc

SEQ ID NO: 131058 - DNA, 25 bp, Homo sapien
tccgaaaaaagttggtttcgacatc

SEQ ID NO: 131059 - DNA, 25 bp, Homo sapien
catatcgggagtcttaagactaata

SEQ ID NO: 131060 - DNA, 25 bp, Homo sapien
catatcgggagtgttaagactaata

SEQ ID NO: 131061 - DNA, 25 bp, Homo sapien
tctggagaagttcactgtgatacat

SEQ ID NO: 131062 - DNA, 25 bp, Homo sapien
tctggagaagttgactgtgatacat

SEQ ID NO: 131063 - DNA, 25 bp, Homo sapien
tactgaacgaaaggatccgttaggt

SEQ ID NO: 131064 - DNA, 25 bp, Homo sapien
tactgaacgaaacgatccgttaggt

SEQ ID NO: 131065 - DNA, 25 bp, Homo sapien
acgtaccactgaggacgggtttgtc

SEQ ID NO: 131066 - DNA, 25 bp, Homo sapien
acgtaccactgacgacgggtttgtc
